United States Patent Application Publication US 2013/0280170 A1 - sequence listing, part 2

SEQ ID NO: 26 - DNA, 188768 bp, Artificial Sequence
  LIVP 8.1.1
atcaaagagagaaagagaataaaaatatttttgtaaaacttttttatgagaccatcaaagagagaaagagaataaaaatatttttgtaaaactttttttatgagaccatcaaagagagaaagagaataaaaatatttttgtaaaactttttttatgagaccatcaaagagagaaagagaataaaaatatttttgtaaaactttttttatgagaccatcaaagagagaaagagaataaaaatatttttgtaaaactttttttatgagaccatcaaagagagaaagagaataaaaatatttttgtaaaactttttttatgagaccatcaaagagagaaagagaataaaaatatttttgtaaaactttttttatgagaccatcaaagagagaaagagaataaaaatatttttgtaaaactttttttatgagaccatcaaagagagaaagagaataaaaatatttttgtaaaactttttttatgagaccatcaaagagagaaagagaataaaaatatttttgtaaaactttttttatgagaccatcaaagagagaaagagaataaaaatatttttgtaaaactttttttatgagaccatcaaagagagaaagagaataaaaatatttttgtaaaactttttttatgagaccatcaaagagagaaagagaataaaaatatttttgtaaaactttttttatgagaccatcaaagagagaaagagaataaaaatatttttgtaaaactttttttatgagaccatcaaagagagaaagagaataaaaatatttttgtaaaactttttttatgagaccatcaaagagagaaagagaataaaaatatttttgtaaaactttttttatgagaccatcaaagagagaaagagaataaaaatatttttgtaaaactttttttatgagaccatcaaagagagaaagagaataaaaatatttttgtaaaactttttttatgagaccatcaaagagagaaagagaataaaaatatttttgtaaaactttttttatgagaccatcagaaagaggtttaatatttttgtgatactctgaaaggaaataggaataggaataggaatagtgtcataatcgtatcacactattgagacagaaaaagaagaagtcgcgagaggtaactttttgtgaatgtagttaagaacatttttgttttgcaaaccggaatatagtgtccggtacacttttttaattcgtggtgtgcctgaatcgttcgattaaccctactcatccaatttcagatgaatagagttatcgattcagacacacgctttgagttttgttgaatcgatgagtgaagtatcatcggttgcaccttcagatgccgatccgtcgacatacttgaatccatccttgacctcaagttcagatgattccttgcacatgtctccgatacgaacgctaaactctagattcttgacgcattttgtatcgacgatcgttgaaccgatgatatcttcgtaactcactttcttatgagagatgttagacccgagtactggatgggtcttgatgtcgctgtctttctcttcttcgctacatctgatgtcgatagacacttcacagtctttgatcatagcaagagcttcttcatgagtgatcgcgggagagtccttaccttgtcctggggacacgctggacaatctagcattcactgtgtttccatcagcggattctgagatggatttaatctgaggacatttggtgaatccaaagttcattctcagacctccaccgatgatggagtaataagtggtaggaggatctacatcctcgactgatgtggaatcatcttctgattccacctcgggatctggatctgactcggactctgtaatttccgttacggattggcaaatcttatcattggtcggtgtttggtcttgctttgtgactttgataataacatcgattcccatatgatgtttgttttcttcttccgtacacgaggaggaggatgaggatgattgctgaagactggcaggcatagcagctgccgccaggcacatgcatgccaggacgatatattgtttcataattgctattgattgagtactgttctttatgattctacttccttaccgtgcaataaattagaatatattttctacttttacgagaaattaattattgtatttattatttatgggtgaaaaacttactataaaaagtgggtgggtttggaattagtgatcagtttatgtatatcgcaactaccgggcatatggctatcgacatcgagaacattacccacatgataagagattgtatcagtttcgtagtcttgagtattggtattactatatagtatatagatgtcgcccactagagttactgtctccgaatgcggcatgatagtatcattctttgctttcgttaactgtttggaggaagaatctttgttattgcatttaatctcgaaattcagagtgcacacctttctcctgtaaagaaacctgaagtcgctaccttattaagaacggagaagtatccatcacgaaatacgggattacagtctttatgattcatagtaatagttagttccgacgttgagatggattcgctgagaccggtagtggtcgtccgagtacacgacgtgtcgttaactggatacaggttaatttccacatcgatatagttaaacgtatttctgggtacgggttcgcatttatctgcggaagagacggtgtgagaatatgttccgagaccacacggagaacagatgacgtctccggatactccgtatcctattccacattttgtttgggaaacacatgccttgcatccggatgatcctttgagaagacaataatatccgggagagcattcacagattctattgtgagtcgtgttacacgatcgcgtcttccgttacaacttagacaagcgggtaaatgattattgcgagatgtgaaggtacccgaaccacacggcgtacatcgtgtgttagtcttgctatcgcataatctggaagcgtatgttcccggacacaaattatggcgtttgtattcgttgtctttacactttccatcggatggtgcatgcggtgctatatctcttccgtttattattatacatgagagaaacaatatatacgagtataatacggacttcatgatttaataatgtagtaatcgttgtcttgttcctgtttcctacttctccaatcatatagatattttctttctatcatggataatatttgtaatggttctttccgtacaacatactgtttagatgatattgcgcataatttccggaggcaaatacgatagtctagattgaccgatggtagactctaatttattgagtgctttgtcgacgagtttacttttacgctccatcgatagatggcactgttctatgagatcgtcgtacatgggaaatgaaatgtgactgtctgaatgtatggctttaagatagctgtgataccgtatacaggtcggtgtcggagattcgaatctctttgaggcgacttatgtcacgatgatggaatctatcttatcgaatgatatatttttcataaatacacttttatagtcctcgtttaaacagaatttactatgtagttccgcgaatgactcgtcccttaataggcagtaggctagtatcttttttacgtagtaatcgtcgtagggagagacatcttgtagaacaacgatttaatcataggtagagatactttcagtctgtggtggatgatgtcattcacaacatccgccttgtatatgatgtttctgttttcaaacaccaagtcgaataccgtctttagtcggaaggttgatgtcgtatccgatgtatgaggcaacattgttgttacaattttgaaaggcggtattatagtattcgtctttctgaatgtcgaacctatctaatagataccgtagtatattgagagtgtatccttgattatgttttatgaatagataaagtagatgttgtccttcttccttttgttcgtgccaattgagtaacattatgagaatatgacctgttgcacaatcgttccatgatgggtgtacaatcaagattattacgtatcctcgagataaaagagcatacaccacacgaggactatgtttggtatactgttgaaggtaagtgtgtaaccgcgttaatgtttgctccataatctattatcgcgtagatgaatcgcttctcggctcgcatcttagtgtgacttaacttgtaataattgctttcgtagaacgtggatatgtgtttacagtagtaatgaagagaagtgagttcatcctcgtcggcgcaattagggtcggatcctttgtacagaacgtaatagtttaagctcccattgaatttatatctaagataacacagcaatagatcggatgatttactaaagtcatcaatggtgtccgttagtatatcaaagatcttgttatcgattgatagtggtcatccttgctatcaaagttacgcatgccgtggtgtaacaatatctttaatacagatggattaaatcgtgtattcatcgtatagcaatgtaatggagagttacctcgtttattcagatcgcagtgtttaataactagcttaaacagatgagacgatgtatccacatcaaagaacgtaaaatacatatgacagacattgttgacagaaacgtgaccttcattcttaccgtcgtccataaatacgttaggtatgtaccacatactgtcgcgaacgatgcgtacaatctcgtccatctcataatgatttactttttcataattaaagatgtgaaagaaaaccgaacaatatatttttttagtaatgtttatgcgagacatataaaataaactccgtgtttatgatgccggtaaatgtttttatcatcttggacggaatcgattttgtaatatgtcatggaaacaaatgaaacaggacattatcgctccatgataaattatttaatggagtaataaagtatctccatgggtaatttcgaaatcaagttatcgtctgtattaatgttgtccactatggagtcgatcctctcattgttctttacagtttctgtaatgatggacgttagttcttttttgtaccatttgatgtcggattctttgcgtatctcaatttgtggcgtttgcttcgtttaaataatatatcaaacatggagacgcctgatatgtagacattcttcattctattaatgtctactctatagcgctttagttccttatgacgaccggcgatatcatactttactttagaaggaaaatcatcatctaggattaaggcgtatctgatacaggcgaataatggttcaggatatagatagcgtatatctctattaaatgcgtcaatcatagtctctagagtgggatggtaactcagtaataaatcaactagcttcgttttgttttctctttggtaactgcttttctggatggccgtattgattatcgagcgtgacactcgctccatattccaataaccgctttgcaaattgtatattattgacatcgaccgcgtaatatagtagagttatcgatcatatctatatcatccatgtacttgcttagtatatcaaatacatctatcagtatggtttcataacagtgatacccgcaattattaaatctcgataatatcagaccgtacatacatagacggccattgttcgatacgtgatttacagccgcgtgtccatattttccacgataaaccttacgacgtttacatcgacgagattattattaacaaagtagtcgtgcagaggatagttgttgtccgttatctaacatgcatcgaacgaccatatcgccgtaatgtaagtagtttatcaacatggcttgtacatcctgttgtctaaatctctttagaatgttatcgatgatgtagtggttatattctctggaatcgtacgaagtaatactacgcattacgtcgacaagagtatgacgtctctcaataagaagattaacgatttccatgtctacattatatggggttactctaaatcgcttgtttagataatacgcctctaatatagggctgacgtcgtatactctacacgtgtccacatcctttattaataataatttaacaatctctatatctatggttgagaaagaccagtagtattggatgggtaaagatcctccttcgtctctgccatggatggaaacattgttatcgatcaaacatttaattacatccttggatagagattgagattctctatgagacgatatatagtaatgaagagagttcttacacatatcactgtcgtacatacaggtacgaaatacgtaaccggtgctgtaacattctgatttaagaagccatagcaatacttctggtctcggattaggcgtcgttacgtatatatccaccaatccgagaccattgattgcataattcgtattcttggacggacgtatccgtttatccacaattaggtattttagcagacgtaagtcgatattatccgaatacagatcgaaatcatttatattcgacttgagttcgttagaggaatttgaatagctggatatcagtagatgcacaatctgagattttacgtatctatgcttactgtatgctcctagcggagttaatccttcgttgtttctacaaagtctctcgactccgcgagagagtaacagccgaacaatcttaatgtctgtatcgcatttattgaagacgtaacaatgtagcgcattgtttcctcgtctatctatatgttttgataagttgtgacacgtttcaatctctggttttatttttttgtacgtcacatcttcatccagtagacgacatagaatagtgcactctctaccacaataatccatagctattctggtgctaattattcctatttcacgaaggcaatcattcctcataagatgataaaaagtgtagtggagatttagtatttagcagtgcggatatgatccaagagggtgagatagtcgttctcgttcagaatctttcgcagcataagtagtatgtcgatatacttatcgttgaagactctttataaaagtctatttgtttatatttattgcggatagcagtatttccctataaaaagtatacgtcctgtggtgtctttaatcatgtacatgaatggatggtttatgtagaccttcgtacgatataccatcgaaaagttaatcgtaaatactcctgtaacggccgatgcttctgtatactcctcattaacatctataaacgtcgtatgtagaaatttttctacagtgatagtttcattacacatcttgctaaaatctgcataatatccgaatatattagtaagtcctaaattttctaaaatcggtaccagattatacggttctgtcatttccactttaaactttggcatatacaagtctatacttttagtagataacataccacaccattttttaaatttttcatctgttatatttttttctatgttatatataccttctatgtcgtccggtagtataattaccatactagagtttccctcgtatggaatatcgataatagagaatcctccgaataattcattaatatgtacatattgcaagttattctcggtacccaccatcatatcaacgctggtaactatattcttagaaatataaaacttgtctgtatatgtaagatgtttagaaaatggatatttccacattgctttaaaatggacggcgctaacaactgtcatacgagtattaatggatagcggactagtcaataaggaattaattttaccatttgtcattgtcttaacccattcgttgattagttcctttgtttggttagcattattaaagtttacagtttgaaaatcgtcttttattttttgtaggaaggaggcgtggaactcgatactatcgctaccgtatattttatttgcggtagctagtgtcgcacaatacggaatatctacctccatgtcatcattattgtcatcgggtgtattctcattcatattctctatatattttgatagttgttcagctgtagaaccagctgctccatgatttagaatagataaagtagataaaatggaaactggagaaatcaaaacattttcatcagggtgttttaagattagttctttaaagatatccatggtatagacctaacgataacgatatatatcataaataaataatgttaaatttcaatttatgtttgtaccccgtattcatacttaacaaattggtattgcgtacacaatcaatcatattacataccattaataatgcaagcataaaaaattgttagtagatgtttctaaatataggttccgtaagcaaagaatataagaatgaagcggtaatgataaaatcaatcgttatctaaaatgatcatactcatttattttattctattatattaacacatacatttttaacagcaacacattcaatattgtattgttatttttatattatttacacaattaacaatatattattagtttatattactgaattaataatataaaattcccaatcttgtcataaacacagaatccatcaaaaatgttgataaattatctgatgttgttgttcgctgctatgataatcagatcattcgccgatagtggtaacgctatcgaaacgacattgccagaaattacaaacgctacaacagatattccagctatcagattatgcggtccagagggagatggatattgtttacacggtgactgtatccacgctagagatatcgacggtatgtattgtagatgctctcatggttatacaggcattagatgtcagcatgtagtattagtagactatcaacgttcagaaaacccaaacactacaacgtcatatatcccatctcccggtattatgcttgtattagtaggcattattatgtgttgtctattatctgtttataggttcactcgacgaactaaactacctatacaagatatggttgtgccataatttttataaatttttttatgagtatttttacaaaaatgtataaagtgtatgtcttatgtatatttataaaaatgctaagtatgcgatgtatctatgttatttgtatttatctaaacaatacctctacctctagatattatacaaaaattttttatttcggcatattaaagtaaaatctagttaccttgaaaatgaatacagtgggtggttccgtatcaccagtaagaacataatagtcaaatacagtatccgattgagattttgcatacaatactagtctagaaagaaatttgtaatcatcttctgtgacgggagtccatatatctgtatcatcgtctagtttatcagtgtcccatgctatattcctgttatcatcattagttaatgaaaataactctcgtgcttcagaaaagtcaaatattgtatccatacatacatctccaaaactatcgcttatacgtttatctttaacgatacctatacctagatggttatttactaacagacattttccagatctattgactataactcctatagtttccacatcaaccaagtaatgatcatctattgttatataacaataacataactcttttccatttttatcagtatgtatatctatatcaacgtcgtcgttgtagtgaatagtagtcattgatctattatatgaaacggatatgtctagaacggcaattgttttacgtccagttaacactttcgttgatttaaagtctagagtctttgcaaacataatatccttatccgactttatatttcctgtagggtggtataattttattttgcctccacatatcggtgtttccaaatatattactagacaatattccatatagttattagttaagggtacccaattagaacacgtacgcttattatcatcatttggatcgtatttcataaaagttattgtgttatcgatgtcaacacattctacattttttaatcgtctatatagtatttttctgatattttctataatatcagaattgtcttccatcggaagttgtatactatcggaatcagttacatgtttaaataattctctgatgtcattccttatacaatcaaattcattattaaacagtttaatagtctgtagacctttatcgtcgtaaatatccattgtcttattagttacgcttatttttatgtgtttttacgttgctttattatattttataagaatgattgtttgacgaatcacgagaactattaagacacattattaggtatatattataaaaaagtttttgattacgatgttataagaggaaagaggacacattaacatcatacatcaattaactacattcttataacatcgtaatcaaaagaattgcaattttgatgtataacaactgtcaatgggttatggaattgtatattacatattatacggtatgttggtaacgacaaataccggtcggtaattgtctgccggtgtaatagaattatatatatctatctattacaccggccttgtatacataataataagttgtggtagtatgatctccatatttataatttaggactttgtattcagtatttttggaatcataaaaaataaaaaaaagttttactaatttaaaatttaaaaagtatttacatttttttcactgtttagtcgcggatatggaattcgatcctgccaaaatcaatacatcatctatagatcatgtaacaatattacaatacatagatgaaccaaatgatataagactaacagtatgcattatccgaaatattatatcaatatcacaaaaataaatacacatttggctaatcaatttcgggcttggaaaaaacgtatcgccggaagggactatatgactaacttatctagagatacaggaatacaacaatcaaaacttactgaaactatacgtaactgtcaaaaaaatagaaacatatatggtctatatatacactacaatttagttattaattggataaccgatgtgattatcaatcaatattaagagggttggtaaattggtacatagctaataatacctatacacccaataatacaacaaccatttctgagttggatatcatcaaaatactaaataaatacgaggacgtgtatagagtaagtaaagaaaaagaatgtggaatttgctatgaagttgtttactcaaaacgatagatactttggtttattggattcgtgtactcatatattttgcataacatgcatcaatatatggcatagaacacgaagagaaaccggtgcgtcggataattgtcctatatgccgtacccgttttagaaacataacaatgagcaagttctataagctagttaactaataaataaaaagtttaatttgttgacgacgtatgtcgttattttttctcgtataaaagattaatttgattctaatataatctttagtattggataaatatcaattcaaattaattccattagattatatcataaataaaaatagtagcacgcactacttcagccaaatattcttttttgaaacgccatctatcgtagtgaggacacaagtgaacctataattatcaaatttattagtatcagtcacatgaaggactttacgtagagtgacgattccactatctgtggtacgaacggtttcatcttctttgatgccatcacccagatgttctataaacttggtatcctcgtccgatctcatatcctttgccaaccaatacatgtagctaaaattaggcataaatttcacacatcctgaacaatgaaattctccagaagatgttacaatgtctagatttggacatttggtttcaaccgcgttaacatatgagtgaacacacccatacatgaaagcgatgagaaataggattctcatcttgccaaaatatcactagaaaaaatttatttatcagttttaaaggtataaaaaatacttattgttgctcgaatattttgtatttgatggtatacggaagattagaaatgtaggtattatcatcaactgattctatggttttatgtattctatcatgtttcactattgcgttggaaataatatcatacgcttccacatatattttattttgttttaactcataatactcacgtaattctggattattggcatatctatgaataattttagctccatgatcagtaaatattaatgagaacatagtattaccacctaccattatttttttcatctcattcaattcttaattgcaaagatctatataatcattatagcgttgacttatggactctggaatcttagacgatgtacagtcatctataatcatggcatatttaatacattgttttatagcatagtcgttatctacgatgttagatatttctctcaatgaatcaatcacacaatctaatgtaggtttatgacataatagcattttcagcagttcaatgtttttagattcgttgatggcaatggctatacatgtatatccgttatttgatctaatgttgacatctgaaccggattctagcagtaaagatactagagattgtttattatatctaacagccttgtgaagaagtgtttctcctcgtttgtcaatcatgttaatgtctttaagataaggtaggcaaatgtttatagtactaagaattgggcaagcataagacatgtcacaaagacccttttttgtatgtataagtgtaaaaattataacatccatagttggatttacataggtgtccaatcgggatctctccatcatcgagataattgatggcatctcccttccttttttagtagatatttcatcgtgtaagaatcaatattaatatttctaaagtatccgtgtatagcctctttatttaccacagctccatattccactagagggatatcgccgaatgtcatatactcaattagtatatgttggaggacatccgagttcattgttttcaatatcaaagagatggtttccttatcatttctccatagtggtacaatactacacattattccgtgcggctttccattttccaaaaacaatttgaccaaatctaaatctacatctttattgtatctataatcactatttagataatcagccataattcctcgagtgcaacatgttagatcgtctatatatgaataagcagtgttatctattcctttcattaacaatttaacgatgtctatatctatatgagatgacttaatataatattgaagagctgtacaatagtttttatctataaaagacggcttgattccgtgattaattagacatttaacaacttccggacgcacatatgctctcgtatccgactctgaatacagatgagagatgatatacagatgcaatacggtaccgcaatttcgtagttgataatcatcatacgcgtatcagtactcgtcctcataaagaacactgcagccattttctatgaacaaatcaataattttagaaacaggatcattgtcattacataattttctataactgaacgatggttttcacatttaacactcaagtcaaatccatgttctaccaacacctttatcaagtcaacgtctacatttttggatttcatatagctgaatatattaaagttatttatgttgctaaatccagtggcttctagtagagccatcgctatatccttattaactttaacatgtctactatttgtgtattcttctaatggggtaagctgtctccaatttttgcgtaatggattagtgccactgtctagtagtagtttgacgacctcgacattattacaatgctcattaaaaaggtatgcgtgtaaagcattattcttgaattggttcctggtatcattaggatctctgtctttcaacatctgtttaagttcatcaagagccacctcctcattttccaaatagtcaaacattttgactgaatgagctactgtgaactctatacacccacacaactaatgtcattaaatatcatgtcaaaaacttgtacaattattaataaaaataatttagtgtttaaattttaccagttccagattttacacctccgttaatacctccattaaccccactggacgatcctcctccccacattccaccgccaccagatgtataagttttagatcctttattactaccatcatgtccatggataaagacactccacatgccgccactaccccctttagaagacatattaataagacttaaggacaagtttaacaataaaattaatcacgagtaccctactaccaacctacactattatatgattatagtttctatttttacagtaccttgactaaagtttctagtcacaagagcaatactaccaacctacactattatatgattatagtttctatttttataggaacgcgtacgagaaaatcaaatgtctaatttctaacggtagtgttgataaacgattgttatccgcggatacctcctctatcatgtcgtctattttcttactttgttctattaacttattagcattatatattatttgattataaaacttatattgcttattagcccaatctgtaaatatcggattattaacatatcgtttctttgtaggtttatttaacatgtacatcactgtaagcatgtccttaccatttattttaatttgacgcatatccgcaatttctttttcgcagtcggttataaattctatatatgatggatacatgctacatgtgtacttataatcgactaatatgaagtacttgatacatattttcagtaacgatttattattaccacctatgaataagtacctgtgatcgtctaggtaatcaactgttttcttaatacattcgatggttggtaatttactcagaataatttccaatatcttaatatataattctgctatttctgggatatatttatctgccagtataacacaaatagtaatacatgtaaacccatattttgttattatattaatgtctgcgccattatctattaaccattctactaggctgacactatgcgactcaatacaatgataaagtatactacatccatgtttatctattttgtttatatcatcaatatacggcttacaaagttttagtatcgataacacatccaactcacgcatagagaaggtagggaataatggcataatatttattaggttatcatcattgtcattatctacaactaagtttccattttttaaaatatactcgacaactttaggatctctattgccaaatttttgaaaatatttatttatatgcttaaatctatataatgtagctccttcatcaatcatacatttaataacattgatgtatactgtatgataagatacatattctaacaatagatcttgtatagaatctgtatatcttttaagaattgtggatattaggatattattacataaactattacacaattctaaaatataaaacgtatcacggtcgaataatagttgatcaactatataattatcgattttgtgatttttcttcctaaactgtttacgtaaatagttagatagaatattcattagttcatgaccactatagttactatcgaataacgcgtcaaatatttcccgtttaatatcgcatttgtcaagataataatagagtgtggtatgttcacgataagtataataacgcatctctttttcgtgtgaaattaaatagtttattacgtccaaagatgtagcataaccatcttgtgacctagtaataatataataatagagaactgttttacccattctatcatcataatcagtggtgtagtcgtaatcgtaatcgtctaattcatcatcccaattataatattcaccagcacgtctaatctgttctattttgatcttgtatccatactgtatgttgctacatgtaggtattcctttatccaataatagtttaaacacatctacattgggatttgatgttgtagcgtatttttctacaatattaataccatttttgatactatttatttctatacctttcgaaattagtaatttcaataagtctatattgatgttatcagaacatagatattcgaatatatcaaaatcattgatatttttatagtcgactgacgacaataacaaaatcacaacatcgtttttgatattattatttttcttggtaacgtatgcctttaatggagtttcaccatcatactcatataatggatttgcaccactttctatcaatgattgtgcactgctggcatcgatgttaaatgttttacaactatcatagagtatcttatcgttaaccatgattggttgttgatgctatcgcattttttggtttctttcatttcagttatgtatggatttagcacgtttgggaagcatgagctcatatgatttcagtactgtagtgtcagtactattagtttcgatcagatcaatgtctagatctatagaatcaaaacacgataggtcagaagataatgaatatctgtaggcttcttgttgtactgtaacttctcgttttgttagatggttgcatcgtgctttaacatcaatggtacaaattttatcctcgctttgtgtatcatattcgtccctactataaaattgtatattcagattatcatgagatgtgtatacgctaacggtatcaataaacggagcacaccatttagtcataaccgtaatccaaaaatttttaaagtatatcttaacgaaagaagttgtgtcattgtctacggtgtatggtactagatcctcataagtgtatatatctagagtaatgtttaatttattaaatggttgataatatggatcctcatgacaatttcctaagacgaaaataagacataaacacgcaataaatctaatcgaagacatggttactccttaaaaaaatacgaataatcaccttggctatttagtaagtgtcatttaacactatactcatattaatccatggactcataatctctatacgggattaacggatgttctatatacggggatgagtagttctcttctttaactttatactttttactaatcatatttagactgatgtatgggtaatagtgtttgaagagctcgttctcatcatcagaataaatcaatatctctgtttttttgttatacagatgtattacagcctcatatattacgtaatagaacgtgtcatctaccttattaactttcaccgcatagttgtttgcaaatacggttaatcctttgacctcgtcgatttccgaccaatctgggcgtataatgaatctaaactttaatttcttgtaatcattcgaaataatttttagtttgcatccgtagttatcccctttatgtaactgtaaatttctcaacgcgatatctccattaataatgatgtcgaattcgtgctgtatacccatactgaatggatgaacgaataccgacggcgttaatagtaatttactttttcatctttacatattgggtactagttttactatcataagtttataaattccacaagctactatggaataagccaaccatcttagtataccacacatgtcttaaagtttattaattaattacatgttgttttatatatatcgctacgaatttaaagagaaattagtttaggaaaaaaaattatctatctacatcatcacgtctctgtattctacgatagagtgctactttaagatgcgacagatctgtgtcatcaaatatatactccattaaaatgattattccggcagcgaacttgatattggatatatcacaacctttgttaatatctacgacaatagacagcagtcccatggttccataaacagtgagtttatctttctttgaagagatattttgtagagatcttataaaactgtcgaatgacatcgcatttatatctttagctaaatcgtatatgttaccatcgtaatatctaaccgcgtctatcttaaacgtttccatcgctttaaagacgtttccgatagatggtctcatttcatcagtcatactgagccaacaaatataatcgtgtataacatctttgatagaatcagactctaaagaaaacgaatcggctttattatacgcattcatgataaacttaatgaaaaatgtttttcgttgtttaagttggatgaatagtatgtcttaataattgttattatttcattaattaatatttagtaacgagtacactctataaaaacgagaatgacataactaatcataactagttatcaaagtgtctaggacgcgtaattttcatatggtatagatcctgtaagcattgtctgtattctggagctattttctctatcgcattagtgagttcagaatatgttataaatttaaatcgaataacgaacataactttagtaaagtcgtctatattaactcttttattttctagccatcgtaataccatgtttaagatagtatattctctagttactacgatctcatcgttgtctagaatatcacatactgaatctacatccaattttagaaattggtctgtgttacatatctcttctatattattgttgatgtattgtcgtagaaaactattacgtagaccattttctttataaaacgaatatatagtactccaattatctttaccgatatatttgcacacataatccattctctcaatcactacatctttaagattttcgttgttaagatatttggctaaactatataattctattagatcatcaacagaatcagtatatatttttctagatccaaagacgaactctttggcgtcctctataatattcccagaaaagatattttcgtgttttagtttatcgagatctgatctgttcatatacgccatgattgtacggtacgttatgataaccgcataaaataaaaatccattttcatttttaaccaatactattcataattgagattgatgtaatactttgttactttgaacgtaaagacagtacacggatccgtatctccaacaagcacgtagtaatcaaatttggtgttgttaaacttcgcaatattcatcaatttagatagaaacttatactcatcatctgttttaggaatccatgtattattaccactttccaacttatcattatcccaggctatgtttcgtccatcatcgttgcgcagagtgaataattcttttgtattcggtagttcaaatatatgatccatgcatagatcggcaaagctattgtagatgtgatttttcctaaatctaatataaaactcgtttactagcaaacactttcctgatttatcgaccaagacacatatggtttctaaatctatcaagtggtggggatccatagttatgacgcagtaacatatattattacattcttgactgtcgctaatatctaaatatttattgttatcgtattggattctgcatatagatggcttgtatgtcaaagatatagaacacataaccaatttatagtcgcgctttacattctcgaatctaaagttaagagatttagaaaacattatatcctcggatgatgttatcactgtttctggagtaggatatattaaagtctttacagatttcgtccgattcaaataaatcactaaataatatcccacattatcatctgttagagtagtatcattaaatctattatattttatgaaagatatatcactgctcacctctatatttcgtacatttttaaactgtttgtataatatctctctgatacaatcagatatatctattgtgtcggtagacgataccgttacatttgaattaatggtgttccattttacaacttttaacaagttgaccaattcatttctaatagtatcaaactctccatgattaaatattttaatagtatccattttatatcactacggacacaaagtagctgacataaaccattgtataatttttatgttttatgtttattagcgtacacattttggaagttccggcttccatgtatttcctggagagcaagtagatgatgaggaaccagatagtttatatccgtacttgcacttaaagtctacattgtcgttgtatgagtatgatcttttaaacccgctagacaagtatccgtttgatattgtaggatgtggacatttaacaatctgacacgtgggtggatcggaccattctcctcctgaacacaggacactagagttaccaatcaacgaatatccactattgcaactataagttacaacgctcccatcggtataaaaatcctcgtatccgttatgtcttccgttggatatagatggaggggattggcatttaacagattcacaaataggtgcctcgggattccataccatagatccagtagatcctaattcacaatacgatttagattcaccgatcaactgatatccgctattacaagagtacgttatactagagccaaagtctactccaccaatatcaagttggccattatcgatatctcgaggcgatgggcatctccgtttaatacattgattaaagagtgtccatccagtacctgtacatttagcatatataggtcccattttttgctttctgtatccaggtagacatagatattctatagtgtctcctatgttgtaattagcattagcatcagtctccacactattcttaaatttcatattaatgggtcgtgacggaatagtacagcatgatagaacgcatcctattcccaacaatgtcaggaacgtcacgctctccaccttcatatttatttatccgtaaaaatgttatcctggacatcgtacaaataataaaaagcccatatatgttcgctattgtagaaattgtttttcacagttgctcaaaaacgatggcagtgacttatgagttacgttacactttggagtctcatctttagtaaacatatcataatattcgatattacgagttgacatatcgaacaaattccaagtatttgattttggataatattcgtattttgcatctgctataattaagatataatcaccgcaagaacacacgaacatctttcctacatggttaaagtacatgtacaattctatccatttgtcttccttaactatatatttgtatagataattacgagtctcgtgagtaattccagtaattacatagatgtcgccgtcgtactctacagcataaactatactatgatgtctaggcatgggagacttttttatccaacgatttttagtgaaacattccacatcgtttaatactacatatttctcatacgtggtataaactccacccattacatatatatcatcgtttacgaataccgacgcgcctgaatatctaggagtaattaagtttggaagtcttatccatttcgaagtgccgtgtttcaaatattctgccacacccgttgaaatagaaaattctaatcctcctattacatataactttccatcgttaacacaagtactaacttctgattttaacgacgacatattagtaaccgttttccattttttcgttttaagatctacccgcgatacggaataaacatgtctattgttaatcatgccgccaataatgtatagacaattatgtaaaacatttgcattatagaattgtctatctgtattaccgactatcgtccaatattctgttctaggagagtaatgggttattgtggatatataatcagagtttttaatgactactatattatgttttataccatttcgtgtcactggctttgtagatttggatatagttaatcccaacaatgatatagcattgcgcatagtattagtcataaacttgggatgtaaaatgttgatgatatctacatcgtttggatttttatgtatccactttaataatatcatagctgtaacatcctcatgatttacgttaacgtcttcgtgggataagatagttgtcagttcatcctttgataattttccaaattctggatcggatgtcaccgcagtaatattgttgattatttctgacatcgacgcattatatagttttttaattccatatcttttagaaaagttaaacatccttatacaatttgtgaaattaatattatgaatcatagtttttacacatagatctactacaggcggaacatcaattattatggcagcaactagtatcatttctacattgtttatggtgatgtttatcttcttccagcgcatatagtctaatagcgattcaaacgcgtgatagtttataccattcaatataatcgcttcatcctttagatggtgatcctgaatgcgtttaaaaaaattatacggagacgccgtaataatttccttattcacttgtataatttccccattgatagaaaatatcacgctttccattcttaaagtactataagtaattatagtataatgtaaacgtttatatattcaatatttttataaaaatcattttgacattaattcctttttaaatttccgtctatcatctatagaaacgtattctatgaatttataaaatgcttttacgtgtcctatcgtaggcgatagaaccgctaaaaagcctatcgaatttctacaaaagaatctgttatatggtatagggagagtataaaacattaaatgtccgtacttattaaagtattcagtagccaatcctaactctttcgaatacttattaatggctcttgttctgtacgaatctatttttttgaacaacggacctagtggtatatcttgttctatgtatctaaaataatgtctgactagatccgttagtttaatatccgcagtcatcttgtctagaatggcaaatctaactgcgggtttaggctttagtttagtttctatatctacatctatgtctttatctaacaccaaaaatataatagctaatattttattacaatcatccggatattcttctacgatctcactaactaatgtttctttggttatactagtatagtcactatcggacaaataaagaaaatcagatgatcgatgaataatacatttaaattcatcatctgtaagatttttgagatgtctcattagaatattattagggttagtactcattatcattcggcagctattacttattttattatttttcaccatatagatcaatcattagatcatcaaaatatgtttcaatcatcctaaagagtatggtaaatgactcttcccatctaatttctgaacgttcaccaatgtctctagccactttggcactaatagcgatcattcgcttagcgtcttctatattattaactggttgattcaatctatctagcaatggaccgtcggacagcgtcattctcatgttcttaatcaatgtacatacatcgccgtcatctaccaattcatccaacaacataagctttttaaaatcatcattataataggtttgatcgttgtcatttctccaaagaatatatctaataagtagagtcctcatgcttagttaacaactattttttatgttaaatcaattagtacaccgctatgtttaatacttattcatattttagtttttaggattgagaatcaatacaaaaattaatgcatcattaattttagaaatacttagtttccacgtagtcaatgaaacatttgaactcatcgtacaggacgttctcgtacaggacgtaactataaaccggtttatatttgttcaagatagatacaaatccgataactttttttacgaattctacgggatccactttaaaagtgtcataccgggttctttttatttttttaaacagatcaatggtgtgatgttgattaggtcttttacgaatttgatatagaatagcgtttacatattctccataatggtcaatcgccatttgttcgtatgtcataaattctttaattatatgacactgtgtattgtttagttcatccttgttcattgttaggaatctatccaaaatggcaattatactagaactataggtgcgttgtatacacatattgatgtgtctgtttatacaatcaatgctactaccttcgggtaaaattgtagcatcatataccatttctagtactttaggttcattattatccattgcagaggacgtcatgatcgaatcataaaaaaatatattatttttatgttattttgttaaaaataatcatcgaatacttcgtaagatactccttcatgaacataatcagttacaaaacgtttatatgaagtaaagtatctacgatttttacaaaagtccggatgcataagtacaaagtacgcgataaacggaataataatagatttatctagtctatctttttctatagctttcatagttagatacatggtctcagaagtaggattatgtaacatcagcttcgataaaatgactgggttatttagtcttacacattcgctcatacatgtatgaccgttaactacagagtctacactaaaatgattgaacaatagatagtctaccattgtttcgtattcagatagtacagcgtagtacatggcatcttcacaaattatatcattgtctaatagatatttgacgcatcttatggatcccacttcaacagccatcttaaaatcggtagaatcatattgctttcctttatcattaataatttctagaacatcatctctatcataaaagatacaaatattaactgtttgatccgtaataacattgctagtcgatagcaatttgttaataagatgcgctgggctcaatgtcttaataagaagtgtaagaggactatctccgaatttgttttgtttattaacatccgttgatggaagtaaaagatctataatgtctacattcttgactgttttagagcatacaatatggagaggtgtatttccatcatgatctggttttgagggactaattcctagtttcatcatccatgagattgtagaagcttttggattgtctgacataagatgtctatgaatatgatttttgccaaatttatccactatcctggcttcgaatccgatggacattatttttttaaacactctttctgaaggatctgtacacgccaacaacggaccacatccttcttcatcaaccgagttgttaatcttggctccatactgtaccaataaatttattctctctatgacttcatcatctgttcccgagagataatatagaggcgttttatgctgtttatcacacgcgtttggatctgcgccgtgcgtcagcagcatcgcgactattctattattattaattttagaagctatatgcaatggataatttccatcatcatccgtctcatttggagagtatcctctatgaagaagttcttcgacaaatcgttcatctagtcctttaattccacaatacgcatgtagaatgtgataattatttccagaaggttcgatagcttgtagcatattcctaaatacatctaaatttttactattatatttggcataaagagatagataatactcggccgacataatgttgtccattgtagtataaaaattaatatttctatttctgtatatttgcaacaatttactctctataacaaatatcataacttagttcttttatgtcaagaaggcactggtttagttcatctataaatgtcacgccataactaccacgcatgccatactcagaattatgataaagatatttatccttggggtgtaggtaatggggattaatctttgttggatcagtctctaagttaacacatgtcacacatgatccatttatagttatatcacacgatgatgatttatgaattgattccggaagatcgctatcgtattttgtggttccacaattcatttccatacatgttattgtcacactaatattatgatgaactttatctagccgctgagtggtaaacaacagaacagatagtttattatctttaccaacaccctcagccgctgccacaaatctctgatccgtatccatgatggtcatgtttatttctagtccgtatccagtcaacactatgttagcatttctgtcgatatagctttcactcatatgacactcaccaataatagtagaattaatgtcgtaatttacaccaatagtgagttcggcggcaaagtaccaataccggtaatcttgtcgaggaggacatatagtattcttgtattctaccgaatacccgagagatgcgatacaaaagagcaagactaatttgtaaaccatcttactcaaaatatgtaacaatagtacgatgcaatgagtaagacaataggaaatctatcttatatacacataattattctatcaattttaccaattagttagtgtaatgttaacaaaaatgtgggagaatctaattagtttttctttacacaattgacgtacatgagtctgagttccttgtttttgctaattatttcatccaatttattattcttgacgatatcgagatcttttgtataggagtcaaacttgtattcaacatgcttttctataatcattttagctatttcggcatcatccaatagtacattttccagattagcagaatagatattaatgtcgtatttgaacagagcctgtaacatctcaatgtctttattatctatagccaatttaatgtccggaatgaagagaagggaattattggtgtttgtcgacgtcatatagtcgagcaagagaatcatcatatccacgtgtccattttttatagtgatgtgaatacaactaaggagaatagccagatcaaaagtagatggtatctctgaaagaaagtaggaaacaatacttacatcattaagcatgacggcatgataaaatgaagttttccatccagttttcccatagaacatcagtctccaatttttcttaacaaacagttttaccgtttgcatgttaccactatcaaccgcataatacaatgcggtgtttcccttgtcatcaaattgtgaatcatccagtccactgaatagcaaaatctttactattttggtatcttccaatgtggctgcctgatgtaatggaaattcattctctagaagatttttcaatgctccagcgttcaacaacgtacatactagacgcacgttattatcagctattgcataatacaaggcactatgtccatggacatccgccttaaatgtatctttactagagagaaagcttttcagctgcttagacttccaagtattaattcgtgacagatccatgtctgaaacgagacgctaattagtgtatattttttcattttttataattttgtcatattgcaccagaattaataatatctttaatagatctgattagtagatacatggctatcgcaaaacaacatatacacatttaataaaaataatatttattaagaaaattcagatttcacgtacccatcaatataaataaaataatgattccttacaccgtacccatattaaggagattccaccttacccataaacaatataaatccagtaatatcatgtctgatgatgaacacaaatggtgtattaaattccagtttttcaggagatgatctcgccgtagctaccataatagtagatgcctctgctacagttccttgttcgtcgacatctatctttgcattctgaaacattttataaatatataatgggtccctagtcatatgtttaaacgacgcattatctggattaaacatactaggagccatcatttcggctatcgacttaatatccctcttattttcgatagaaaatttagggagtttaagattgtacactttattccctaattgagacgaccaatagtctaattttgcagccgtgatagaatctgtgaaatgggtcatattatcacctattgccaggtacatactaatattagcatccttatacggaaggcgtaccatgtcatattctttgtcatcgattgtgattgtatttccttgcaatttagtaactacgttcatcatgggaaccgttttcgtaccgtacttattagtaaaactagcattgcgtgttttagtgatatcaaacggatattgccatatacctttaaaatatatagtattaatgattgcccatagagtattattgtcgagcatattagaatctactacattagacataccggatctacgttctactatagaattaattttattaaccgcatctcgtctaaagtttaatctatataggccgaatctatgatattgttgataatacgacggtttaatgcacacagtattatctacgaaactttgataagttagatcagtgtacgtatatttagatgttttcagcttagctaatcctgatattaattctgtaaatgctggacccagatctctttttctcaaatccatagtcttcaataattctattctagtattacctgatgcaggcaatagcgacataaacatagaaaacgaataaccaaacggtgagaagacaatattatcatcttgaatatttttatacgctactataccggcattggtaaatccttgtagacgataggcggacgctgaacacgctaacgatagtatcaataacgcaatcatgattttatggtattaataattaaccttatttttatgttcggtataaaaaaattattgatgtctacacatccttttgtaattgacatctatatatccttttgtataatcaactctaatcactttaacttttacagttttccctaccagtttatccctatattcaacatatctatccatatgcatcttaacactctctgccaagatagcttcagagtgaggatagtcaaaaagataaatatatagagcataatcattctcgtatactctgccctttattacatcacccgcattgggcaacgaataacaaaatgcaagcatcttgttaacgggctcgtaaattgggataaaaattatgtttttattgtcttatatctattttattcaagagaatattcaggaatttctttttccggttgtatctcgtcgcagtatatatcatttgtacattgtttcatattttttaatagtttacaccttttagtaggactagtatcgtacaattcatagctgtattttgaattccaatcacgcataaaaatatcttccaattgttgacgaagacctaatccatcatccggtgtaatattaatagatgctccacatgtatccgtaaagtaatttcctgtccaatttgaggtacctatataggccgttttatcggttaccatatatttggcatggtttaccctagaatacggaatgggaggatcagcatctggtacaataaatagctttacttctatatttatgtttttagattttagcatagcgatagatcttaaaaagtttctcatgataaacgaagatcgttgccagcaactaatcaatagcttaacggatacttgtctgtctatagcggatcttcttaattcatcttctatataaggccaaaacaaaattttacccgccttcgaataaataatagggataaagttcataacagatacataaacgaatttactcgcatttctaatacatgacaataaagcggttaaatcattggttctttccatagtacatagttgttgcggtgcagaagcaataaatacagagtgtggaacgccgcttacgttaatactaagaggatgatctgtattataatacgacggataaaagtttttccaattatatggtagattgttaactccaagataccagtatacctcaaaaatttgagtgagatccgctgccaagttcctattattgaagatcgcaatacccaattccttgacctgagttagtgatctccaatccatgttagcgcttcctaaataaatatgtgtattatcagatatccaaaattttgtatgaagaactcctcctaggatatttgtaatatctatgtatcgtacttcaactccggccatttgtagtctttcaacatcctttaatggtttgttagatttattaacggctactctaactcgtactcctcttttgggtaattgtacaatctcgtttaatattatcgtgccgaaattcgtacccacttcatccgataaactccaataaaaagatgatatatctagtgtttttgtggtattggatagaatttccctccacatgttaaatgtagacaaatatactttatcaaattgcatacctataggaatagtttctgtaatcactgcgattgtattatccggattcattttatttgttaaaagaataatcctatatcacttcactctattaaaaatccaagtttctatttctttcatgactgattttttaacttcatccgtttccttatgaagatgatgtttggcaccttcataaatttttatttctctattacaatttgcatgttgcatgaaataatatgcacctaaaacatcgctaatcttattgtttgttccctggagtatgagagtcgggggggtgttaatcttggaaattatttttctaaccttgttggtagccttcaagacctgactagcaaatccagccttaattttttcatgattgactaatgggtcgtattggtatttataaactttatccatatctctagatactgattctggacatagctttccgactggcgcatttggtgtgatggttcccataagtttggcagctagcagattcagtcttgaaacagcatctgcattaactagaggagacattagaatcattgctgtaaacaagtttggattatcgtaagaggctagctcccatggaatgacccaataagtagatttaatagttaccacgtgctgtaccaaagtcatcaatcatcattttttcaccattacttcttccatgtccaatatgatcatgtgagaatactaaaattcctaacgatgatatgttttcagctagttcgtcataacgtccagaatgtttaccagctccatgacttatgaatactaatgccttaggatatgtaataggtttccaatatttacaatatatgtaatcattgtccagattgaacatacagtttgcactcatgattcacgttatataactatcaatattaacagttcgtttgatgatcatattatttttatgttttattgataattgtaaaaacatacaattaaatcaatatagaggaaggagacggctactgtcttttgtgagatagtcatggcgactaaattagattatgaggatgctgttttttactttgtggatgatgataaaatatgtagtcgcgactccatcatcgatctaatagatgaatatattacgtggagaaatcatgttatagtgtttaacaaagatattaccagttgtggaagactgtacaaggaattgatgaagttcgatgatgtcgctatacggtactatggtattgataaaattaatgagattgtcgaagctatgagcgaaggagaccactacatcaattttacaaaagtccatgatcaggaaagtttattcgctaccataggaatatgtgctaaaatcactgaacattggggatacaaaaagatttcagaatctagattccaatcattgggaaacattacagatttgatgaccgacgataatataaacatcttgatactttttctagaaaaaaaattgaattgatgatataggggtcttcataacgcataattattacgttagcattctatatccgtgttaaaaaaaattatcctatcatgtatttgagagttttatatgtagcaaacatgatagctgtgatgccaataagctttagatattcacgcgtgctagtgttagggatggtattatctggtggtgaaatgtccgttatataatctacaaaacaatcatcgcatatagtatgcgatagtagagtaaacatttttatagtttttactggattcatacatcgtctacccaattcggttataaatgaaattgtcgccaatcttacacccaaccccttgttatccattagcatagtattaacttcgttatttatgtcataaactgtaaatgattttgtagatgccatatcatacatgatattcatgtccctattataatcattactaactttatcacaatatatgttgataatatctatatatgatctagtctttgtgggcaactgtctatacaagtcgtctaaacgttgtttactcatatagtatcgaacagccatcattacatggtcccgttccgttgatagataatcgagtatgttagtggacttgtcaaatctatataccatattttctggaagtggatatacatagtcgtgatcaacattattgctagcctcatcttctatatcctgtactataccattatctatatcatctacataatctatgatattattacacataaacatcgacaacatactattgtttattatctaagtcctgttgatccaaacccttgatctcctctatttgtactatctagagattgtacttcttccagttctggataatatatacgttgatagattagctgagctattctatctccagtatttacattaaacgtacattttccattattaataagaatgactcctatgtttcccctataatcttcgtctattacaccacctcctatatcaatgccttttagtgacagaccagacctaggagctattctaccatagcaaatcttaggcatggacatactaatatctgtcttaattaactgtctttctcctggagggatagtataatcgtaagcgctatacaaatcatatccggcagcacccggcgattgcctagtaggagatttagctctgttagtttccttaacaaatctaactggtgagttaatattcatgttgaacataaaactaatattttatttcaaaattatttaccatcccatatattccatgaataagtgtgatgattgtacacttctatagtatctatatacgattcacgataaaatcctcctatcaatagcagtttattatccactatgatcaattctggattatccctcggataaataggatcatctatcagagtccatgtattgctggattcacaataaaattccgcatttctaccaaccaagaataaccttctaccgaacactaacgcgcatgatttataatgaggataataagtggatggtccaaactgccactgatcatgattgggtagcaaatattctgtagttgtatcagtttcagaatgtcctcccattacgtatataacattgtttatggatgccactgctggattacatctaggtttcagaagactcggcatattaacccaagcagcatccccgtggaaccaacgctcaacagatgtgggatttggtagacctcctactacgtataatttattgttagcgggtatcccgctagcatacagtctggggctattcatcggaggaattggaatccaattgtttgatatataatttaccgctatagcattgttatgtatttcattgttcatccatccaccgatgagatatactacttctccaacatgagtacttgtacacatatggaatatatctataatttgatccatgttcataggatactctatgaatggatacttgtatgatttgcgtggttgtttatcacaatgaaatattttggtacagtctagtatccattttacattatttatacctctgggagaaagataatttgacctgattacatttttgataaggagtagcagatttcctaatttatttcttcgctttatataccacttaatgacaaaatcaactacataatcctcatctggaacatttagttcatcgctttctagaataagtttcatagatagataatcaaaattgtctatgatgtcatcttccagttccaaaaagtgtttggcaataaagtttttagtatgacataagagattggatagtccgtattctatacccatcatgtaacactcgacacaatattcctttctaaaatctcgtaagataaagtttatacaagtgtagatgataaattctacagaggttaatatagaagcacgtaataaattgacgacgttatgactatctatatatacctttccagtatacgagtaaataactatagaagttaaactgtgaatgtcaaggtctagacaaaccctcgtaactggatctttatttttcgtgtatttttgacgtaaatgtgtgcgaaagtaaggagataactttttcaatatcgtagaattgactattatattgcctcctatggcatcaataattgttttgaatttcttagtcatagacaatgctaatatattcttacagtacacagtattgacaaatatcggcatttatgtttctttaaaagtcaacatctagagaaaaatgattatctttttgagacataactcccattttttggtattcacccacacgtttttcgaaaaaattagtttttccttccaatgatatattttccatgaaatcaaacggattggtaacattataaatttttttaaatcccaattcagaaatcaatctatccgcgacgaattctatatatgttttcatcatttcacaattcattcctataagtttaactggaagagccgcagtaagaaattcttgttcaatggatactgcatctgttataatagatctaacggtttcttcactcggtggatgcaataaatgtttaaacatcaaacatgcgaaatcgcagtgcagaccctcgtctctactaattagttcgttggaaaacgtgagtccgggcattaggccacgctttttaagccaaaatatggaagcgaatgatccggaaaagaagattccttctactgcagcaaaggcaataagtctctctccataaccggcgctgtcatgtatccacttttgagcccaatcggccttcttttttacacaaggcatcgtttctatggcattaaagagatagtttttttcattactatctttaacataagtatcgatcaaaagactatacatttccgaatgaatgttttcaatggccatctgaaatccgtagaaacatctagcctcggtaatctgtacttctgtacaaaatcgttccgccaaattttcattcactattccgtcactggctgcaaaaaacgccaatacatgttttataaaatatttttcgtctggtgttagtttattccaatcattgatatctttagatatatctacttcttccactgtccaaaatgatgcctctgcctttttatacatgttccagatgtcataatattggattgggaaaataacaaatctatttggatttggtgcaaggatgggttccataactaaattaacaatatcaataaattttttttcagttatctatatgcctgtacttggattttttgtacatcgatatcgccgcaatcactacaataattacaagtattattgatagcattgttattagtactatcataattaaattatctacattcatgggtgctgaataatcgttattatcatcattatcattttgtaattgtgacatcatactagataaatcgtttgcgagattgttgtgggaagcgggcatggaggatgcattatcattattatttaacgccttccatttggattcacaaatgttacgcacattcaacattttatggaaactataattttgtgaaaacaaataacaagaaaactcgtcatcgttcaaatttttaacgatagtaaaccgattaaacgtcgagctaatttctaacgctagcgactctgttggatatgggtttccagatatatatcttttcagttcccctacgtatctataatcatctgtaggaaatggaagatatttccatttatctactgttcctaatatcatatgtggtggtgtagtagaaccattaagcgcgaaagatgttatttcgcatcgtattttaacttcgcaataatttctggttagataacgcactctaccagtcaagtcaatgatattagcctttacagatatattcatagtagtcgtaacgatgactccatcttttagatgcgatactcctttgtatgtaccagaatcttcgtacctcaaactcgatatatttaaacaagttaatgagatattaacgcgttttatgaatgatgatatataaccagaagttttatcctcggtggctagcgctataaccttatcattataataccaactagtgtgattaatatgtgacacgtcagtgtgggtacaaatatgtacattatcgtctacgtcgtattcgatacatccgcatacagccaacaaatataaaatgacaaatactctaacgccgttcgtacccatcttgatgcggtttaataaatgttttgatttcaatttattgtaaaaaaagattcggttttatactgttcgatattctcattgcttatattttcatctatcatctccacacagtcaaatccgtggttagcatgcacctcatcaaccggtaaaagactatcggactcttctatcattataactctagaatatttaatttggtcattattaatcaagtcaattatcttatttttaacaaacgtgagtattttactcattttttataaaaacttttagaaatatacagactctatcgtgtgtctatatcttctttttatatccaatgtatttatgtctgatttttcttcatttatcatatataatggtccaaattctacacgtgcttcggattcatccagatcattaaggttcttataattgtaacatccttctcttccctcttctacatcttccttcttattcttattcttagcgtcacagaatctaccacagcaggatcccatgacgagcgtcatattaaactaatccattttcaattataatatatgattagtaatgaccattaaaataaaaaatattcttcataaccggcaagaaagtgaaaagttcacattgaaactatgtcagtagtatacatcatgaaatgatgatatatatatactctattttggtggaggattatatgatataattcgtggataatcatttttaagacacatttctttattcgtaaatcttttcacgttaaatgagtgtccatattttgcaatttcttcatatgatggcggtgtacgtggacgaggctgctcctgttcttgttgtggtcgccgactgtcgtgtctgcgtttagatccctccattatcgcgattgcgtagatggagtactattttataccttgtaattaaatttttttattaattaaacgtataaaaacgttccgtatctgtatttaagagccagatttcgtctaatagaacaaatagctacagtaaaaataactagaataattgctacacccactagaaaccacggatcgtaatacggcaatcggttttcgataataggtggaacgtatattttatttaaggacttaacaattgtctgtaaaccacaatttgcttccgcggatcctgtattaactatctgtaaaagcatatgttgaccgggcggagccgaacattctccgatatctaatttctgtatatctataatattattaacctccgcatacgcattacagttcttttctagcttggataccgcactaggtacatcgtctagatctattcctatttcctcagcgatagctcttctatccttttccggaagcaatgaaatcacttcaataaatgattcaaccatgagtgtgaaactaagtcgagaattactcatgcatttgttagttattcggagcgcgcaatttttaaactgtcctataacctctcctatatgaatagcacaagtgacattagtagggatagaatgttgagctaatttttgtaaataactatctataaaaagattatacaaagttttaaactctttagtttccgccatttatccagtctgagaaaatgtctctcataataaatttttccaagaaactaattgggtgaagaatggaaacctttaatctatatttatcacagtctgttttggtacacatgatgaattcttccaatgccgtactaaattcgatatctttttcgatttctggatatgtttttaataaagtatgaacaaagaaatggaaatcgtaataccagttatgtttaactttgaaattgttttttattttcttgttaatgattccagccacttgggaaaagtcaaagtcgtttaatgccgatttaatacgttcattaaaaacaaactttttatcctttagatgaattattattggttcattggaatcaaaaagtaagatattatcgggtttaagatctgcgtgtaaaaagttgtcgcaacagggtagttcgtagattttaatgtataacagagccatctgtaaaaagataaactttatgtattgtaccaaagatttaaatcctaatttgatagctaactcggtatctactttatctgccgaatacagtgctaggggaaaaattataatgtttcctctttcatattcgtagttagttctcttttcatgttcgaaaaagtgaaacatgcggttaaaatagtttataacattaatattactgttaataactgccggataaaagtgggatagtaatttcacgaatttgatactgtcctttctctcgttaaacgcctttaaaaaaactttagaagaatatctcaatgagagttcctgaccatccatagtttgtatcaataatagcaacatatgaagaacacgtttatacagagtatgtaaaaatgttaatttatagtttaatcccatggcccacgcacacacgattaattttttttcatctccctttagattgttgtatagaaatttgggtactgtgaactccgccgtagtttccatgggactatataattttgtggcctcgaatacaaattttactacatagttatctatcttaaagactataccatatcctcctgtagatatgtgataaaaatcgtcgtttataggataaaatcgtttatccttttgttggaaaaaggatgaattaatgtaatcattctcttctatctttagtagtgtttccttattaaaattcttaaaataatttaacaatctaactgacggagcccaattttggtgtaaatctaattgggacattatattgttaaaatacaaacagtctcctaatataacagtatctgataatctatggggagacatccattgatattcaggggatgaatcattggcaacacccatttattgtacaaaaagccccaatttacaaacgaaagtccaggtttgatagagacaaacaattaactattttgtctctgtttttaacacctccacagtttttaatttctttagtaatgaaattattcacaatatcagtatcttctttatctaccagagattttactaacttgataaccttggctgtctcattcaatagggtagtaatatttgtatgtgtgatattgatatctttttgaattgtttcttttagaagtgattctttgatggtgccagcatacgaattacaataatgcagaaactcggttaacatgcaggaattatagtaagccaattccaattgttgcctgtgttgtattagagtgtcaatatgagcaatggtgtccttgcgtttctctgatagaatgcgagcagcgattttggcgttatcatttgacgatatttctggaatgacgaatcctgtttctactaactttttggtaggacaaagtgaaacaatcaagaagatagcttctcctcctatttgtggaagaaattgaactcctctagatgatctactgacgatagtatctccttgacagatattggaccgaattacagaagtacctggaatgtaaagccctgaaaccccctcattttttaagcagattgttgccgtaaatcctgcactatgcccaagatagagagctcctttggtgaatccatctctatgtttcagtttaaccaagaaacagtcagctggtctaaaatttccatctctatctaatacagcatctaacttgatgtcaggaactatgaccggtttaatgttatatgtaacattgagtaaatccttaagttcataatcatcactgtcatcagttatgtacgatccaaacaatgtttctaccggcatagtggatacgaagatgctatccatcagaatgtttccctgattagtattttctatatagctattcttctttaaacgattttccaaatcagtaactatgttcatttttttaggagtaggacgcctagccagtatggaagaggattttctagatcctctcttcaacatctttgatctcgatggaatgcaaaaccccatagtgaaacaaccaacgataaaaataatattgtttttcactttttataattttaccatctgactcatggattcattaatatctttataagagctactaacgtataattctttataactgaactgagatatatacaccggatctatggtttccataattgagtaaatgaatgctcggcaataactaatggcaaatgtatagaacaacgaaattatactagagttgttaaagttaatattttctatgagctgttccaataaattatttgttgtgactgcgttcaagtcataaatcatcttgatactatccagtaaaccgtttttaagttctggaatattatcatcccattgtaaagcccctaattcgactatcgaatatcctgctctgatagcagtttcaatatcgacggacgtcaatactgtaataaaggtggtagtattgtcatcatcgtgataaactacgggaatatggtcgttagtaggtacggtaactttacacaacgcgatatataactttccttttgtaccatttttaacgtagttgggacgtcctgcagggtattgttttgaagaaatgatatcgagaacagatttgatacgatatttgttggattcctgattattcactataatataatctagacagatagatgattcgataaatagagaaggtatatcgttggtaggataatacatccccattccagtattctcggatactctattgatgacactagttaagaacatgtcttctattctagaaaacgaaaacatcctacatggactcattaaaacttctaacgctcctgattgtgtctcgaatgcctcgtacaaggatttcaaggatgccatagattctttgaccaacgatttagaattgcgtttagcatctgatttttttattaaatcgaatggtcggctctctggtttgctaccccaatgataacaatagtcttgtaaagataaaccgcaagaaaatttatacgcatccatccaaataaccctagcaccatcggatgatattaatgtattattatagattttccatccacaattattgggccagtatactgttagcaacggtatatcgaatagattactcatgtaacctactagaatgatagttcgtgtactagtcataatatctttaatccaatctaaaaaatttaaaattagattttttacactgttaaagttaacaaaagtattacccgggtacgtggatatcatatatggcattggtccattatcagtaatagctccataaactgatacggcgatggtttttatatgtgtttgatctaacgaggaagaaattcgcgcccacaattcatctctagatatgtatttaatatcaaacggtaacacatcaatttcgggacgcgtatatgtttctaaatttttaatccaaatataatgatgacctatatgccctattatcatactgtcaactatagtacacctagggaacttacgatacatctgtttcctataatcgttaaattttacaaatctataacatgctaaaccttttgacgacagccattcattaatttctgatatggaatctgtattctcgataccgtatcgttctaaagccagtgctatatctccctgttcgtgggaacgctttcgtataatatcgatcaacggataatctgaagtttttggagaataatatgactcatgatctatttcgtccataaacaatctagacataggaattggaggcgatgatcttaattttgtgcaatgagtcgtcaatcctataacttctaatcttgtaatattcatcatcgacataatactatctatgttatcatcgtatattagtataccatgaccttcttcatttcgtgccaaaatgatatacagtcttaaatagttacgcaatatctcaatagtttcataattgttagctgttttcatcaaggtttgtatcctgtttaacatgatggcgttctataacgtctctattttctatttttaattttttaaatttttaacgatttactgtggctagatacccaatctctctcaaatatttttttagcctcgcttacaagctgtttatctatactattaaaactgacgaatccgtgattttggtaatgggttccgtcgaaatttgccgaagtgatatgaacatattcgtcgtcgactatcaacaattttgtattattctgaatagtgaaaaccttcacagatagatcattttgaacacacaacgcatctagacttttggcggttgccatagaatatacgtcgttcttatcccaattaccaactagaagtctgatcttaactcctctattaatggctgcttctataatggagttgtaaatgtcgggccaatagtagctattaccgtcgacacgtgtagtgggaactatggccaaatgttcaatatctatactagtcttagctgacctgagtttatcaataactacatcggtatctagatctctagaatatcccaataggtgttccggagaatcagtaaagaacactccacctataggattcttaatatgatacgcagtgctaactggcaaacaacaagccgcagagcataaattcaaccatgaattttttgcgctattaaaggctttaaaagtatcaaatcttctacgaagatctgtggccagcgggggataatcagaatatacacctaacgttttaatcgtatgtatagatcctccagtaaatgacgcgtttcctacataacatctttcatcatctgacacccaaaaacaaccgagtagtagtcccacattattttttttatctatattaacggttataaaatttatatccgggcagtgactttgtagctctcccagatttcttttccctcgttcatctagcaaaactattattttaatcccttttttagatgcctcttttagtttatcaaaaataagcgctcccctagtcgtactcagaggattacaacaaaaagatgctatgtatatatatttcttagctagagtgataatttcgttaaaacattcaaatgttgttaaatgatcggatctaaaatccatattttctggtagtgtttctaccagcctacattttgctcccgcaggtaccgatgcaaatggccacatttagttaacataaaaacttatacatcctgttctatcaacgattctagaatatcatcggctatatcgctaaaattttcatcaaagtcgacatcacaacctaactcagtcaatatattaagaagttccatgatgtcatcttcgtctatttctatatccgtatccattgtagattgttgaccgattatcgagtttaaatcattactaatactcaatccttcagaatacaatctgtatttcattgtaaatttataggcggtgtatttaagttggtagattttcaattatgtatcaatatagcaacagtagttcttgctcctccttgattctagcatcctcttcattattttcttctacgtacataaacatgtccaatacgttagacaacacaccgacgatggcggccgctacagacacgaatatgactagaccgatgaccatttaaaaacccctctctagctttcacttaaactgtatcgatcattcttttagcacatgtataatataaaaacattattctatttcgaatttaggcttccaaaaatttttcatccgtaaaccgataataatatatatagacttgttaatagtcggaataaatagattaatgcttaaactatcatcatctccacgattagagatacaatatttacattctttttgctgtttcgaaactttatcaatacacgttaatacaaacccaggaaggagatattgaaactgaggctgttgaaaatgaaacggtgaatacaataattcagataatgtaaaatcatgattccgtattctgatgatattagaactgctaatggatgtcgatggtatgtatctaggagtatctattttaacaaagcatcgatttgctaatatacaattatcattttgattaattgttattttattcatattcttaaaaggtttcatatttatcaattcttctacattaaaaatttccatttttaatttatgtagccccgcaatactcctcattacgtttcattttttgtctataatatccattttgttcatctcggtacatagattatccaattgagaagcgcatttagtagttttgtacattttaagtttattgacgaatcgtcgaaaactagttatagttaacattttattatttgataccctgatattaatacccctgccgttactattatttataactgatgtaacccacgtaacattagaattaattatcgatagtaatgcatcaacgcttccaaaattgtctattataaactcaccgataatttttttattgcatgttttcatattcattaggattatcaaatctttaatcttattacgattgtatgcgttgatattacaagacgtcattctaaaagacggaggatttccatcaaatgccagacaatcacgtacaaagtacatggaaataggttttgttctattgcgcatcatagatttatatagaacacccgtagaaatactaatttgttttactctataaaatactaatgcatctatttcatcgttttgtataacgtctttccaagtgtcaaattccaaatttttttcattgatagtaccaaattcttctatctctttaactacttgcatagataggtaattacagtgatgcctacatgccgttttttgaaactgaatagatgcgtctagaagcgatgctacgctagtcacaatcaccactttcatatttagaatatatatatgtaaaaatatagtagaatttcattttgttttttctatgctataaatgaattctcattttgcatctgctcatactccgttttatatcaataccaaagaaggaagatatctggttctaaaagccgttaaagtatgcgatgttagaactgtagaatgcgaaggaagtaaagcttcctgcgtactcaaagtagataaaccctcatcacccgcgtgtgagagaagaccttcgtccccgtccagatgcgagagaatgaataaccctggaaaacaagttccgtttatgagaacggacatgctacaaaatatgttcgcggctaatcgcgataatgtagcttctagacttttgtcctaaaatacaattatatccttttcgatattaataaatccgtgtcgtccaggttttttatctctttcagtatgtgaatagataggtattttatctctattcatcatcgaatttaagagatccgataaacattgtttgtattctccagatgtcagcatctgatacaacaatatatgtgcacataaacctctggcacttatttcatgtaccttccccttatcactaaggagaatagtatttgagaaatatgtatacatgatattatcatgaattagatatacagaatttgtaacactctcgaaatcacacgatgtgtcggcgttaagatctaatatatcactcgataacacattttcatctagatacactagacattttttaaagctaaaatagtctttagtagtaacagtaactatgcgattattttcatcgatgatacatttcatcggcatattattacgcttaccatcaaagactataccatgtgtatatctaacgtattctagcatggttgccatacgcgcattaaacttttcaggatctttggatagatcttccaatctatctatttgagaaaacatttttatcatgttcaatagttgaaacgtcggatccactatatagatattatctataaagattttaggaactacgttcatggtatcctggcgaatattaaaactatcaatgatatgattatcgttttcatcttttatcaccatatagtttctaagatatgggattttacttaatataatattatttcccgtgataaattttattagaaaggccaaatctataagaaaagtcctagaattagtctgaagaatatctatatcgccgtatagtatatttggattaattagatatagagaatatgatccgtaacatatacaacttttattatggcgtctaagatattcttccatcaacttattaacatttttgactagggaagatacattatgacgtcccattacttttgccttgtctattactgcgacgttcatagaatttagcatatctcttgccaattcttccattgatgttacattataagaaattttagatgaaattacatttggagctttaatagtaagaactcctaatatgtccgtgtatgtggtcactaatacagattgtagttctataatcgtaaataatttacctatattatatgtttgagtctgtttagaaaagtagctaagtatacgatcttttatttctgatgcagatgtattaacatcggaaaaaaatctttttttattcttttttactaaagatacaaatatgtctttgttaaaaacagttattttctgaatatttctagcttgtaattttaacatatgatattcgttcacactaggtactctgcctaaataggtttctataatctttaatgtaatattaggaaaagtattctgatcaggattcctattcattttgaggatttaaaactctgattattgtctaatatggtctctacgcaaactttttcacagagcgatagagtttttgataactcgtttttcttaagaaatataaaactactgtttccagagctcgctctatcttttattttatctaattcgatacaaactcctgatactggttcagaaagtaattcattaattttcagtcctttatagaagatatttaatatagataatacaaaatcttcagtttttgatatcgatctgattgatcctagaactagatatattaataacgtgctcattaggcagtttatggcagcttgataattagatatagtatattccagttcatatttattagataccgcattgcccagattttgatattctatgaattcctctgaaaataaatccaaaataactagacattctattttttgtggattagtgtactctcttccctctatcatgttcactactggtgtccacgatgataaatatctagagggaatataatatagtccataggatgccaatctagcaatgtcgaataactgtaatttgattcttcgttcttcattatgaattgattcttgaggtataaacctaacacaaattatattattagacttttcgtatgtaatgtctttcatgttataagtttttaatcctggaatagaatctattttaatgaggcttttaaacgcagagttctccaacgagtcaaagcataatactctgttgtttttcttatatacgatgttacgattttcttctttgaatggaataggtttttgaattagtttataattacaacataatagataaggaagtgtgcaaatagtacgcggaaaaaacataatagctcccctgttttcatccatggttttaagtaaatgatcactggcttctttagtcaatggatattcgaacattaaccgtttcatcatcattggacagaatccatattttttaatgtaaagagtgatcaaatcattgtgtttattgtaccatcttgttgtaaatgtgtattcggttatcggatctgctcctttttctattaaagtatcgatgtcgatctcgtctaagaattcaactatatcgacatatttcatttgtatacacataaccattactaacgtagaatgtataggaagagatgtaacgggaacagggtttgttgattcgcaaactattctaatacataattcttctgttaatacgtcttgcacgtaatctattatagatgccaagatatctatataattattttgtaagatgatgttaactatgtgatctatataagtagtgtaataattcatgtatttcgatatatgttccaactctgtctttgtgatgtctagtttcgtaatatctatagcatcctcaaaaaatatattcgcatatattcccaagtcttcagttctatcttctaaaaaatcttcaacgtatggaatataataatctattttacctcttctgatatcattaatgatataatttttgacactatcttctgtcaattgattcttattcactatatctaagaaacggatagcgtccctaggacgaactactgccattaatatctctattatagcttctggacataattcatctattataccagaattaatgggaactattccgtatctatctaacatagttttaagaaagtcagaatctaagacctgatgttcatatattggttcatacatgaaatgatctctattgatgatagtgactatttcattctctgaaaattggtaactcattctatatatgctttccttgttgatgaaggatagaatatactcaatagaatttgtaccaacaaactgttctcttatgaatcgtatatcatcatctgaaataatcatgtaaggcatacatttaacaattagagacttgtctcctgttatcaatatactattcttgtgataatttatgtgtgaggcaaatttgtccacgttctttaattttgttatagtagatatcaaatccaatggagctacagttcttggcttaaacagatatagtttttctggaacaaattctacaacattattataaaggactttgggtagataagtgggatgaaatcctattttaattaatgcgatagccttgtcctcgtgcagatatccaaacgcttttgtgatagtatggcattcattgtctagaaacgctctacgaatatctgtgacagatatcatctttagagaatatactagtcgcgttaatagtactacaatttgtattttttaatctatctcaataaaaaaattaatatgtatgattcaatgtataactaaactactaactgttattgataactagaatcagaatctaatgatgacgtacccaagaagtttatctactgccaatttagctgcattatttttagcatctcgtttagattttccatctgccttatcgaatactcttccgtcgatatctacacaggcataaaatgtaggagagttactaggcccaactgattcaatacgaaaagaccaatctctcttagttatttggcagtactcattaataacggtgacagggttagcatctttccaatcaataatttttttagccggaataacatcatcaaaagacttatgatcctctctcattgatttttcgcgggatacatcatctattatgacgtcagccataacatcagcatccggcttatccgcctccgttgtcataaaccaacgaggaggaatatcgtcggagctgtacaccatagcactacgttgaagatcgtacagagctttattaacttctcgcttctccatattaagttgtctagttagttgtgcagcagtagctccttcgattccaatggttttaatagcctcacacacaatctctgcgttagaacgttcgtcgatatagattttagacatttttagagagaactaacacaaccagcaataaaactgaacctactttatcatttttttattcatcatcctctggtggttcgtcgttcctatcaaatgtagctctgattaacccgtcatctataggtgatgctggttctggagattctggaggagatggattattatctggaagaatctctgttatttccttgttttcatgtatcgattgcgttgtaacattaagattgcgaaatgctctaaatttgggaggcttaaagtgttgtttgcaatctctacacgcgtgtctaactagtggaggttcgtcagctgctctagtttgaatcatcatcggcgtagtattcctacttttacagttaggacacggtgtattgtatttctcgtcgagaacgttaaaataatcgttgtaactcacatcctttattttatctatattgtattctactcctttcttaatgcattttataccgaataagagatagcgaaggaattctttttcggtgccgctagtacccttaatcatatcacatagtgttttatattccaaatttgtggcaatagacggtttatttctatacgatagtttgtttctggaatcctttgagtattctataccaatattattctttgattcgaatttagtttcttcgatattagattttgtattacctatattcttgatgtagtactttgatgatttttccatggcccattctattaagtcttccaagttggcatcatccacatattgtgatagtaattctcggatatcagtagcggctaccgccattgatgtttgttcattggatgagtaactactaatgtatacattttccatttataacacttatgtattaactttgttcatttatattttttcattattatgttgatattaacaaaagtgaatatatatatatgttaataattgtattgtggttatacggctacaattttataatgagtgaaagtcagtgtccgatgatcaatgacgatagctttactctgaaaagaaagtatcaaatcgatagtgcggagtcaacaataaaaatggataagaagaggataaagtttcagaatagagccaaaatggtaaaagaaataaatcagacaataagagcagcacaaactcattacgagacattgaaactaggatacataaaatttaagagaatgattaggactactactctagaagatatagcaccatctattccaaataatcagaaaacttataaactattctcggacatttcagccatcggcaaagcatcacagaatccgagtaagatggtatatgctctgctgctttacatgtttcccaatttgtttggagatgatcatagattcattcgttatagaatgcatccaatgagtaaaatcaaacacaagatcttctctcctttcaaacttaatcttattagaatattagtggaagaaagattctataataatgaatgcagatctaataaatggaaaataattggaacacaagttgataaaatgttgatagctgaatctgataaatatacaatagatgcaaggtataacctaaaacccatgtatagaatcaagggagaatctgaagaagataccctcttcatcaaacagatggtagaacaatgtgtgacatcccaggaattggtggaaaaagtgttgaagatactgtttagagatttgttcaagagtggagaatacaaagcgtacagatacgatgatgatgtagaaaatggattcattggattggatacactaaaattaaacattgttcatgatatagttgaaccatgtatgcctgttcgtaggccagtggctaagatactgtgtaaagaaatggtaaataaatactttgagaatccgctacatattattggtaaaaatcttcaagagtgcattgactttgttagtgaataggcatttcatctttctccaatactaattcaaattgttaaattaataatggatagtataaatagttattagttataagatagtaaaaataattattagaataagagtgtagtatcatagataactctcttctataaaaatggattttattcgtagaaagtatcttatatacacagtagaaaataatatagattttttaaaggatgatacattaagtaaagtaaacaattttaccctcaatcatgtactagctctcaagtatctagttagcaattttcctcaacatgttattactaaggatgtattagctaataccaatttttttgttttcatacatatggtacgatgttgtaaagtgtacgaagcggttttacgacacgcatttgatgcacccacgttgtacgttaaagcattgactaagaattatttatcgtttagtaacgcaatacaatcgtacaaggaaaccgtgcataaactaacacaagatgaaaaatttttagaggttgccgaatacatggacgaattaggagaacttataggcgtaaattatgacttagttcttaatccattatttcacggaggggaacccatcaaagatatggaaatcatttttttaaaactgtttaagaaaacagacttcaaagttgttaaaaaattaagtgttataagattacttatttgggcatacctaagcaagaaagatacaggcatagagtttgcggataatgatagacaagatatatatactctatttcaacaaactggtagaatcgtccatagcaatctaacagaaacgtttagagattatatctttcccggagataagactagctattgggtgtggttaaacgaaagtatagctaatgatgcggatatcgttcttaatagacccgccattaccatgtatgataaaattcttagttatatatactctgagataaaacaaggacgcgttaataaaaacatgcttaagttagtttatatctttgagcctgaaaaagatatcagagaacttctgctagaaatcatatatgatattcctggagatatcctatctattattgatgcaaaaaacgacgattggaaaaaatattttattagtttttataaagctaattttattaacggtaatacatttattagtgatagaacgtttaacgaggacttattcagagttgttgttcaaatagatcccgaatatttcgataatgaacgaattatgtctttattctctacgagtgctgcggacattaaacgatttgatgagttagatattaataacagttatatatctaatataatttatgaggtgaacgatatcacattagatacaatggatgatatgaagaagtgtcaaatctttaacgaggatacgtcgtattatgttaaggaatacaatacatacctgtttttgcacgagtcggatcccatggtcatagagaacggaatactaaagaaactgtcatctataaaatccaagagtagacggctgaacttgtttagcaaaaacattttaaaatattatttagacggacaattggctcgtctaggtcttgtgttagatgattataaaggagacttgttagttaaaatgataaaccatcttaagtctgtggaggatgtatccgcattcgttcgattttctacagataaaaaccctagtattcttccatcgctaatcaaaactattttagctagttataatatttccatcatcgtcttatttcaaaggtttttgagagataatctatatcatgtagaagaattcttggataaaagcatccatctaaccaagacggataagaaatatatacttcaattgataagacacggtagatcatagaacagaccaaatatattattaataatttgtatatacatagatataattatcacacatttttgataaatgggaactgctgcaacaattcagactcccaccaaattaatgaataaagaaaatgcagaaatgattttggaaaaaattgttgatcatatagttatgtatattagtgacgaatcaagtgattcagaaaataatcctgaatatattgattttcgtaacagatacgaagactatagatctctcattataaaaagtgatcacgagtttgtaaagctatgtaaaaatcatgcggagaaaagttctccagaaacgcaacaaatgattatcaaacacatatacgaacaatatcttattccagtatctgaagtactattaaaacctataatgtccatgggtgacataattacatataacggatgtaaagacaatgaatggatgctagaacaactctctaccctaaactttaacaatctccgcacatggaactcatgtagcataggcaatgtaacgcgtctgttttatacattttttagttatctgatgaaagataaactaaatatataagtataatcccattctaatactttaacctgatgtattagcatcttattagaatattaacctaactaaaagacataacataaaaactcattacatagttgataaaaagcggtaggatataaatattatggctgccaccgttccgcgttttgacgacgtgtacaaaaatgcacaaagaagaattctagatcaagaaacattttttagtagaggtctaagtagaccgttaatgaaaaacacatatctatttgataattacgcgtatggatggataccagaaactgcaatttggagtagtagatacgcaaacttagatgcaagtgactattatcccatttcgttgggattacttaaaaagttcgagtttctcatgtctctatataaaggtcctattccagtatacgaagaaaaagtaaatactgaattcattgctaatggatctttctccggtagatacgtatcatatcttagaaagttttctgctcttccaacaaacgagtttattagttttttgttactgacttccattccaatctataatatcttgttctggtttaaaaatactcagtttgatattactaaacacacattattcagatacgtctatacagataatgccaaacacctggcgttggctaggtatatgtatcaaacaggagactataagcctttgtttagtcgtctcaaagagaattatatatttaccggtcccgttccaatatgtatcaaagatatagatcaccctaatcttagtagagcaagaagtccatccgattatgagacattagctaatattagtactatattgtactttaccaagtatgatccggtattaatgtttttattgttttacgtacctgggtattcaattactacaaaaattactccagccgtagaatatctaatggataaactgaatctaacaaagagcgacgtacaactgttgtaaattattttatgcttcgtaaaatgtaggttttgaaccaaacattctttcaaagaatgagatgcataaaactttattatccaatagattgactatttcggacgtcaatcgtttaaagtaaacttcgtaaaatattctttgatcactgccgagtttaaaacttctatcgataattgtctcatatgttttaatatttacaagttttttggtccatggtacattagccggacaaatatatgcaaaataatatcgttctccaagttctatagtttctggattatttttattatattcagtaaccaaatacatattagggttatctgcggatttataatttgagtgatgcattcgactcaacataaataattctagaggagacgatctactatcaaattcggatcgtaaatctgtttctaaagaacggagaatatctatacatacctgattagaattcatccgtccttcagacaacatctcagacagtctggtcttgtatgtcttaatcatattcttatgaaacttggaaacatctcttctagtttcactagtacctttattaattctctcaggtacagattttgaattcgacgatgccgagtatttcatcgttgtatatttcttcttcgattgcataatcagattcttatataccgcttcaaactctattttaaaattattaaacaatactctattattaatcagtcgttctaactctttcgctatttctatagacttatcgacatcttgactgtctatctctgtaaacacggagtcggtatctccatacacgctacgaaaacgaaatctgtaatctataggcaacgatgttttcacaatcggattaatatctctatcgtccatataaaatggattacttaatggattggcaaaccgtaacataccgttagataactctgctccatttagtaccgattctagatacaagatcattctacgtcctatggatgtgcaactcttagccgaagcgtatgagtatagagcactatttctaaatcccatcagaccatatactgagttggctactatcttgtacgtatattgcatggaatcatagatggccttttcagttgaactggtagcctgttttagcatctttttatatctggctctctctgccaaaaatgttcttaatagtctaggaatggttccttctatcgatctatcgaaaattgctatttcagagatgaggttcggtagtctaggttcacaatgaaccgtaatatatctaggaggtggatatttctgaagcaatagctgattatttatttcttcttccaatctattggtactaacaacgacaccgactaatgtttccggagatagatttccaaagatacacacattaggatacagactgttataatcaaagattaatacattattactaaacattttttgttttggagcaaataccttaccgccttcataaggaaacttttgttttgtttctgatctaactaagatagttttagtttccaacaatagctttaacagtggacccttgatgactgtactcgctctatattcgaataccatggattgaggaagcacatatgttgacgcacccgcgtctgtttttgtttctactccataatactcccacaaatactgacacaaacaagcatcatgaatacagtatctagccatatctaaagctatgtttagattataatccttatacatctgagctaaatcaacgtcatcctttccgaaagataatttatatgtatcattaggtaaagtaggacataatagtacgactttaaatccattttcccaaatatctttacgaattactttacatataatatcctcatcaacagtcacataattacctgtggttaaaacctttgcaaatgcagcggctttgcctttcgcgtctgtagtatcgtcaccgatgaacgtcatttctctaactcctctatttaatactttacccatgcaactgaacgcgttcttggatatagaatccaatttgtacgaatccaatttttcaaatttttgaatgaatgaatatagatcgaaaaatatagttccattattgttattaacgtgaaacgtagtattggccatgccgcctactcccttatgactagactgatttctctcataaatacagagatgtacagcttcctttttgtccggagatctaaagataatcttctctcctgttaataactctagacgattagtaatatatctcagatcaaagttatgtccgttaaaggtaacgacgtagtcgaacgttagttccaacaattgtttagctattcgtaacaaaactatttcagaacatagaactagttctcgttcgtaatccatttccattagtgactgtatcctcaaacatcctctatcgacggcttcttgtatttcctgttccgttaacatctcttcattaatgagcgtaaacaataatcgtttaccacttaaatcgatataacagtaacttgtatgcgagattgggttaataaatacagaaggaaacttcttatcgaagtgacactctatatctagaaataagtacgatcttgggatatcgaatctaggtatttttttagcgaaacagttacgtggatcgtcacaatgataacatccattgttaatctttgtcaaatattgctcgtccaacgagtaacatccgtctggagatatcccgttagaaatataaaaccaactaatattgagaaattcatccatggtggcattttgtatgctgcgtttctttggctcttctatcaaccacatatctgcgacggagcattttctatctttaatatctagattataacttattgtctcgtcaatgtctatagttctcatctttcccaacggcctcgcattaaatggaggaggagacaatgactgatatatttcgtccgtcactacgtaataaaagtaatgaggaaatcgtataaatacggtctcaccatttcgacatctggatttcagatataaaaatctgttttcaccgtgactttcaaaccaattaatgcaccgaacatccatttatagaatttagaaatatattttcatttaaatgaatcccaaacattggggaagagccgtatggaccattatttttatagtactttcgcaagcgggtttagacggcaacatagaagcgtgtaaacgaaaactatatactatagttagcactcttccatgtcctgcatgtagacggcacgcgactatcgctatagaggacaataatgtcatgtctagcgatgatctgaattatatttattattttttcatcagattatttaacaatttggcatctgatcccaaatacgcgatcgatgtgacaaaggttaaccctttataaacttaacccattataaaacttatgattagtcacaactgaaataaccgcgtgattattttttggtataattctacacggcatggtttctgtgactatgaattcaacccccgttacattagtgaaatctttaacaaacagcaagggttcgtcaaagacataaaactcattgtttacaatcgaaatagaccccctatcacacttaaaataaaaaatatccttatcctttaccaccaaataaaattctgattggtcaatgtgaatgtattcacttaacagttccacaaatttatttattaactccgaggcacatacatcgtcggtattttttatggcaaactttactcttccagcatccgtttctaaaaaaatattaacgagttccatttatatcatccaatattattgaaatgacgttgatggacagatgatacaaataagaaggtacggtacctttgtccaccatctcctccaattcatgctctattttgtcattaactttaatgtatgaaaacagtacgccacatgcttccatgacagtgtgtaacactttggatacaaaatgtttgacattagtataattgttcaagactgtcaatctataatagatagtagctataatatattctatgatggtattgaagaagatgacaaccttggcatattgatcatttaacacagacatggtatcaacagatagcttgaatgaaagagaatcagtaattggaataagcgtcttctcgatagagtgtccgtataccaacatgtctgatattttgatgtattccattaaattatttagttttttctttttattctcgttaaacagcatttctgtcaacggaccccaacatcgttgaccgattaagttttgattgatttttccgtgtaaggcgtatctagtcagatcgtatagcctatccaataatccatcatctgtgcgtagatcacatcgtacactttttaattctctatagaagagcgacagacatctggagcaattacagacagcaatttctttattctctacagatgtaagatacttgaagacattcctatgatgatgcagaattttggataacacggtattgatggtatctgttaccataattcctttgatggctgatagtgtcagagcacaagatttccaatctttgacaatttttagcaccattatctttgttttgatatctatatcagacagcatggtgcgtctgacaacacagggattaagacggaaagatgaaatgattctctcaacatcttcaatagataccttgctattttttctggcattatctatatgtgcgagaatatcctctagagaatcagtatcctttttgatgatagtggatctcaatgacatgggacgtttaaaccttcttattctatcaccagattgcatggtgatttgtcttctttcttttatcataatgtaatctctaaattcatcggcaaattgtctatatctaaaatcataatatgagatgtttacctctacaaatatctgttcgtccaatgttagagtatttacatcagttttgtattccaaattaaacatggcaacggatttaattttatattcctctattaagtcctcgtcgataataacagaatgtagataatcatttaatccatcgtacatggttggaagatgcttgttgacaaaatctttaattgtcttgatgaaggtgggactatatctaacatcttgattaataaaatttataacattgtccataggatactttgtaactagttttatacacatctcttcatcggtaagtttagacagaatatcgtgaacaggtggtatattatattcatcagatatacgaagaacaatgtccaaatctatattgtttaatatattatatagatgtagcgtagctcctacaggaatatctttaactaagtcaatgatttcatcaaccgttagatctattttaaagttaatcatataggcattgatttttaaaaggtatgtagccttgactacattctcattaattaaccattccaagtcactgtgtgtaagaagattatattctatcataagcttgactacatttggtcccgataccattaaagaattcttatgatataaggaaacagcttttaggtactcatctactctacaagaattttggagagccttaacgatatcagtgacgtttattatttcaggaggaaaaaacctaacattgagaatatcggaattaatagcttccagatacagtgattttggcaatagtccgtgtaatccataatccagtaacacgagctggtgcttgctagacaccttttcaatgtttaatttttttgaaataagctttgataaagccttcctcgcaaattccggatacatgaacatgtcggcgacatgattaagtattgttttttcattatttttatattttctcaacaagttctcaataccccaatagatgatagaatatcacccaatgcgtccatgttgtctatttccaacaggtcgctatatccaccaatagaagtttttccaaaaaagattctaggaacagttctaccaccagtaatttgttcaaaatagtcacgcaattcattttcgggtttaaattctttaatatcgacaatttcatacgctcctcttttgaaactaaacttatttagaatatccagtgcatttctacaaaaaggacatgtatacttgacaaaaattgtcactttgttattggccaacctttgttgtacaaattcctcggccattttaatatttaagtgatataaaactatctcgacttatttaactctttagtcgagatatatggacgcagatagctatatgatagccaactacagaaggcaaacgctataaaaaacataattacgacgagcatatttataaatatttttattcagcattacttgatatagtaatattaggcacagtcaaacattcaaccactctcgatacattaactctctcattttctttaacaaattctgcaatatcttcgtaaaaagattcttgaaactttttagaatatctatcgactctagatgaaatagcgttcgtcaacatactatgttttgtatacataaaggcgcccattttaacagtttctagtgacaaaatgctagcgatcctaggatcctttagaatcacatagattgacgattcgtctctcttagtaactctagtaaaataatcatacaatctagtacgcgaaataatattatccttgacttgaggagatctaaacaatctagttttgagaacatcgataagttcatcgggaatgacatacatactatctttaatagaactcttttcatccagttgaatggattcgtccttaaccaactgattaatgagatcttctattttatcattttccagatgatatgtatgtccattaaagttaaattgtgtagcgcttctttttagtctagcagccaatactttaacatcactaatatcgatatacaaaggagatgatttatctatggtattaagaattcgtttttcgacatccgtcaaaaccaattcctttttgcctgtatcatccagttttccatcctttgtaaagaaattattttctactagactattaataagactgataaggattcctccataattgcacaatccaaactttttcacaaaactagactttacaagatctacaggaatgcgtacttcaggttttttagcttgtgattttttcttttgcggacattttcttgtgaccaactcatctaccatttcattgattttagcagtgaaataagctttcaatgcacgggcactgatactattgaaaacgagttgatcttcaaattccgccatttaagttcaccaaacaacttttaaatacaaatatatcaatagtagtagaataagaactataaaaaaaataataattaaccaataccaaccccaacaaccggtattattagttgatgtgactgttttctcatcacttagaacagatttaacaatttctataaagtctgtcaaatcatcttccggagaccccataaatacaccaaatatagcggcgtacaacttatccatttatacattgaatattggcttttctttatcgctatcttcatcatattcatcatcaatatcaacaagtcccagattacgagccagatcttcttctacattttcagtcattgatacacgttcactatctccagagagtccgataacgttagccaccacttctctatcaatgattagtttcttgagcgcgaaagtaatttttgtttccgttccggatctatagaagacgataggtgtgataattgccttggccaattgtctttctcttttactgagtgattctagttcaccttctatagatctgagaatggatgattctccagtcgaaacatattctaccatggatccgtttaatttgttgatgaagatggattcatccttaaatgttttctctgtaatagtttccaccgaaagactatgcaaagaatttggaatgcgttccttgtgcttaatgtttccatagacggcttctagaagttgatacaacataggactagccgcggtaacttttatttttagaaagtatccatcgcttctatcttgtttagatttatttttataaagtttagtctctccttccaacataataaaagtggaagtcatttgactagataaactatcagtaagttttatagagatagacgaacaattagcgtattgagaagcatttagtgtaacgtattcgatacattttgcattagatttactaatcgattttgcatactctataacacccgcacaagtctgtagagaatcgctagatgcagtaggtcttggtgaagtttcaactctcttcttgattaccttactcatgattaaacctaaataattgtactttgtaatataatgatatatattttcactttatctcatttgagaataaaaatgtttttgtttaaccactgcatgatgtacagatttcggaatcgcaaaccaccagtggttttattttatccttgtccaatgtgaattgaatgggagcggatgcgggtttcgtacgtagatagtacattcccgtttttagaccgagactccatccgtaaaaatgcatactcgttagtttggaataactcggatctgctatatggatattcatagattgactttgatcgatgaaggctcccctgtctgcagccatttttatgatcgtcttttgtggaatttcccaaatagttttataaactcgcttaatatcttctggaaggtttgtattctgaatggatccaccatctgccataatcctattcttgatctcatcattccataattttctctcggttaaaactctaaggagatgcggattaactacttgaaattctccagacaatactctccgagtgtaaatattactggtatacggttccaccgactcattatttcccaaaatttgagcagttgatgcagtcggcataggtgccaccaataaactatttctaagaccgtatgttctgattttatcttttagaggttcccaattccaaagatccgacggtacaacattccaaagatcatattgtagaataccgttactggcgtacgatcctacatatgtatcgtatggtccttccttctcagctagttcacaactcgcctctaatgcaccgtaataaatggtttcgaagatcttcttatttagatcttgtgcttccaggctatcaaatggataatttaagagaataaacgcgtccgctaatccttgaacaccaataccgataggtctatgtctcttattagagatttcagcttctggaataggataataattaatatctataattttattgagatttctgacaattactttgaccacatccttcagtttgagaaaatcaaatcgcccatctattacaaacatgttcaaggcaacagatgccagattacaaacggctacctcattagcatccgcatattgtattatctcagtgcaaagattactacacttgatagttcctaaattttgttgattactctttttgttacacgcatccttataaagaatgaatggagtaccagtttcaatctgagattctataatcgctttccagacgactcgagcctttattatagatttgtatctcctttctctttcgtatagtgtatacaatcgttcgaactcgtctccccaaacattgtccaatccaggacattcatccggacacatcaacgaccactctccgtcatccttcactcgtttcataaagagatcaggaatccaaagagctataaatagatctctggttctatgttcctcgtttcctgtattctttttaagatcgaggaacgccataatatcagaatgccacggttccaagtatatggccataactccaggccgtttgtttcctccctgatctatgtatctagcggtgttattataaactctcaacattggaataataccgtttgatataccattggtaccggagatatagcttccactggcacgaatattactaattgatagacctattccccctgccattttagagattaatgcgcatcgttttaacgtgtcatagataccctctatgctatcatcgatcatgttaagtagaaaacagctagacatttggtgacgactagttcccgcattaaataaggtaggagaagcgtgcgtaaaccatttttcagaaagtagattgtacgtctcaatagctgagtctatatcccattgatgaattcctactgcgacacgcattaacatgtgctgaggtctttcaacgatcttgttgtttattttcaacaagtaggatttttccaaagttttaaaaccaaaatagttgtatgaaaagtctcgttcgtaaataataaccgagttgagtttatccttatatttgttaactatatccatggtgatacttgaaataatcggagaatgtttcccatttttaggattaacatagttgaataaatcctccatcacttcactaaatagtttttttgtttccttgtgtagatttgatacggctattctggcggctagaatggcataatccggatgttgtgtagtacaagtggctgctatttcggctgccagagtgtccaattctaccgttgttactccattatatattccttgaataaccttcatagctattttaataggatctatatgatccgtgtttaagccataacataattttctaatacgagacgtgattttatcaaacatgacattttccttgtatccatttcgtttaatgacaaacatttttgttggtgtaataaaaaaattatttaacttttcattaatagggatttgacgtatgtagcgtacaaaatgatcgttcctggtatatagataaagagtcctatatatttgaaaatcgttacggctcgattaaactttaatgattgcatagtgaatatatcattaggatttaactccttgactatcatggcggcgccagaaattaccatcaaaagcattaatacagttatgccgatcgcagttaaaacggttatagcatccaccatttatatctaaaaattagatcaaagaatatgtgacaaagtcctagttgtatactgagaattgacgaaacaatgtttcttacatatttttttcttattagtaactgacttaatagtaggaactggaaagctagacttgattattctataagtatagatacccttccagataatgttctctttgataaaagttccagaaaatgtagaattttttaaaaagttatcttttgctattaccaagattgtgtttagacgcttattattaatatgagtgatgaaatccacaccgcctctagatatcgcctttatttccacattagatggtaaatccaatagtgaaactatctttttaggaatgtatggactcgcgtttagaggagtgaacgtcttgggcgtcggaaaggatgattcgtcaaacgaataaacaatttcacaaatggatgttaatgtattagtaggaaattttttgacgctagtggaattgaagattctaatggatgatgttctacctatttcatccgataacatgttaatttccgacaccaacggttttaatatttcgatgatatacggtagtctctctttcggacttatatagcttattccacaatacgagtcattatatactccaaaaaacaaaataactagtataaaatctgtatcgaatgggaaaaacgaaattatcgacataggtatagaatccggaacattgaacgtattaatacttaattctttttctgtggtaagtaccgataggttattgacattgtatggttttaaatattctataacttgagacttgatagatattagtgatgaattgaaaattatttttatcaccacgtgtgtttcaggatcatcgtcgacgcccgtcaaccaaccgaatggagtaaaataaatatcattaatatatgctctagatattagtatttttattaatcctttgattatcatcttctcgtaggcgaatgattccatgatcaagagtgatttgagaacatcctccggagtattaatgggcttagtaaacagtccatcgttgcaataataaaagttatccaagttaaaggatattatgcattcgtttaaagatatcacctcatctgacggagacaattttttggtaggttttagagactttgaagctacttgtttaacaaagttattcatcgtcgtctactattctatttaattttgtagttaatttatcacatatcacattaattgactttttggtccatttttccatacgtttatattcttttaatcctgcgttatccgtttccgttatatccagggatagatcttgcaagttaaatagaatgctcttaaataatgtcattttcttatccgctaaaaatttaaagaatgtataaacctttttcagagatttgaaactcttaggtggtgtcctagtacacaatatcataaacaaactaataaacattccacattcagattccaacagctgattaacttccacattaatacagcctattttcgctccaaatgtacattcgaaaaatctgaataaaacatcgatgtcacaatttgtattatccaatacagaatgtttgtgattcgtgttaaaaccatcggagaaggaatagaaataaaaattattatagtggtggaattcagttggaatattgcctccggagtcataaaaggatactaaacattgttttttatcataaattacacatttccaatgagacaaataacaaaatccaaacattacaaatctagaggtagaacttttaattttgtctttaagtatatacgataagatatgtttattcataaacgcgtcaaatttttcatgaatcgctaaggagtttaagaatctcatgtcaaattgtcctatataatccacttcggatccataagcaaactgagagactaagttcttaatacttcgattgctcatccaggctcctctctcaggctctattttcatcttgacgacctttggattttcaccagtatgtattcctttacgtgataaatcatcgattttcaaatccatttgtgagaagtctatcgccttagatactttttcccgtagtcgaggtttaaaaaaatacgctaacggtatactagtaggtaactcaaagacatcatatatagaatggtaacgcgtctttaactcgtcggttaactctttcttttgatcgagttcgtcgctactattgggtctgctcaggtgccccgactctactagttccaacatcataccgataggaatacaagacactttgccggcggttgtagatttatcatatttttccactacatatccgttacaatttgttaaaaatttagatacatctatattgctacataatccagctagtgaatatatatgacataataaattggtaaatcctagttctggtattttactaattactaaatctgtatatctttccatttatcatggaaaagaatttaccagatatcttcttttttccaaactgcgttaatgtattctcttacaaatattcacaagatgaattcagtaatatgagtaaaacggaacgtgatagtttctcattggccgtgtttccagttataaaacatagatggcataacgcacacgttgtaaaacataaaggaatatacaaagttagtacagaagcacgtggaaaaaaagtatctcctccatcactaggaaaacccgcacacataaacctaaccgcgaagcaatatatatacagtgaacacacaataagctttgaatgttatagttttctaaaatgtataacaaatacagaaatcaattcgttcgatgagtatatattaagaggactattagaagctggtaatagtttacagatattttccaattccgtaggtaaacgaacagatactataggtgtactagggaataagtatccatttagcaaaattccattggcctcattaactcctaaagcacaacgagagatattttcagcgtggatttctcatagacctgtagttttaactggaggaactggagtgggtaagacgtcacaggtacccaagttattgctttggtttaattatttatttggtggattctctactctagataaaatcactgactttcacgaaagaccagtcattctatctcttcctaggatagctttagttagattgcatagcaataccattttaaaatcattgggatttaaggtactagatggatctcctatttctttacggtacggatctataccggaagaattaataaacaaacaaccaaaaaaatatggaattgtattttctacccataagttatctctaacaaaactatttagttatggcactcttattatagacgaagttcatgagcatgatcaaataggagatattattatagcagtagcgagaaagcatcatacgaaaatagattctatgtttttaatgactgccacgttagaggatgacagggaacggctaaaagtatttttacctaatcccgcatttatacatattcctggagatacactgtttaaaattagcgaggtatttattcataataagataaatccatcttccagaatggcatacatagaagaagaaaagagaaatttagttactgctatacagatgtatactcctcctgatggatcatccggtatagtctttgtggcatccgttgcacagtgtcacgaatataaatcatatttagaaaaaagattaccgtatgatatgtatattattcatggtaaggtcttagatatagacgaaatattagaaaaagtgtattcatcacctaatgtatcgataattatttctactccttatttggaatccagcgttactatacgcaatgttacacacatttatgatatgggtagagtttttgtccccgctccttttggaggatcgcaacaatttatttctaaatctatgagagatcaacgaaaaggaagagtaggaagagttaatcctggtacatacgtctatttctatgatctgtcttatatgaagtctatacagcgaatagattcagaatttctacataattatatattgtacgctaataagtttaatctaacactccccgaagatttgtttataatccctacaaatttggatattctatggcgtacaaaggaatatatagactcgttcgatattagtacagaaacatggaataaattattatccaattattatatgaagatgatagagtatgctaaactttatgtactaagtcctattctcgctgaggagttggataactttgagaggacgggagaattaactagtattgtacgagaagccattttatctctaaatttacgaattaagattttaaattttaaacataaagatgatgatacgtatatacacttttgtaaaatattattcggtgtctataacggaacaaacgctactatatattatcatagacctctaacgggatatatgaatatgatttcagatactatatttgttcctgtagataataactaaaaatcaaactctaatgaccacatctttttttagagatgaaaaattttccacatctccttttgtagacacgactaaacattttgcagaaaaaagtttattagtgtttagataatcgtatacttcatcagtgtagatagtaaatgtgaacagataaaaggtattcttgctcaatagattggtaaattccatagaatatattaatcctttcttcttgagatcccacatcatttcaaccagagacgttttatccaatgatttacctcgtactataccacatacaaaactagattttgcagtgacgtcgtacctggtattcttaccaaacaaaattttacttttagttcttttagaaaattctaaggtagaatctctatttgccaatatgtcatctatggaattaccactagcaaaaaatgatagaaatatatattgatacatcgcagctggttttgatctactatactttaaaaacgaatcagattccataattgcctgtatatcatcagctgaaaaactatgttttacacgtattccttcggcatttctttttaatgatatatcttgtttagacaatgataaagttatcatgtccatgagagacgcgtctccgtatcgtataaatatttcattagatgttagacgcttcattaggggtatacttctataaggtttcttaatcagtccatcattggttgcgtcaagaactactatcggatgttgttgggtatctctagtgttacacatggccttactaaagtttgggtaaataactatgatatctctattaattatagatgcatatatttcatttgtcaaggatattagtatcgacttgctatcgtcattaatacgtgtaatgtaatcatataaatcatgcgatagccaaggaaaatttaaatagatgttcatcatataatcgtcgctataattcatattaatacgttgacattgactaatttgtaatatagcctcgccacgaagaaagctctcgtattcagtttcatcgataaaggataccgttaaatataactggttgccgatagtctcatagtctattaagtggtaagtttcgtacaaatacagaatccctaaaatattatctaatgttggattaatctttaccataactgtataaaatggagacggagtcataactattttaccgtttgtacttactggaatagatgaaggaataatctccggacatgctggtaaagacccaaatgtctgtttgaagaaatccaatgttccaggtcctaatctcttaacaaaaattacgatattcgatcccgatatcctttgcattctatttaccagcatatcacgaactatattaagattatctatcatgtctattctcccaccgttatataaatcgcctccgctaagaaacgttagtatatccatacaatggaatacttcatttctaaaatagtattcgttttctaattctttaatgtgaaatcgtatactagaaagggaaaaattatctttgagttttccgttagaaaagaaccacgaaactaatgttctgattgcgtccgattccgttgctgaattaatggatttacaccaaaaactcatataacttctagatgtagaagcattcgctaaaaaattagtagaatcaaaggatataagtagatgttccaacaagtgagcaattcccaagatttcatctatatcattctcgaatccgaaattagaaattcccaagtagatatcctttttcatccgatcgttgatgaaaatacgaactttattcggtaagacaatcatttactaaggagtaaaataggaagtaatgttcgtatgtcgttatcatcgtataaattaaaggtgtgttttttaccattaagtgacattataattttaccaatattggaattataatataggtgtatttgcgcactcgcgacggttgatgcatcggtaaatatagctgtatctaatgttctagtcggtatttcatcatttcgctgtctaataatagcgttttctctatctgtttccattacagctgcctgaagtttattggtcggataatatgtaaaataataagaaatacatacgaataacaaaaataaaataagatataataaagatgccatttagagatctaattttgtttaacttgtccaaattcctacttacagaagatgaggaatcgttggagatagtgtcttccttatgtagaggatttgaaatatcttataatgacttgataacttactttccagataggaaataccataaatatatttataaagtatttgaacatgtagatttatcggaggaattaagtatggaattccatgatacaactctgagagatttagtctatcttagattgtacaagtattccaagtgtatacggccgtgttataaattaggagataatctaaaaggcatagttgttataaaggacaggaatatttatattagggaagcaaatgatgacttgatagaatatctcctcaaggaatacactcctcagatttatacatattctaatgagcgcgtccccataactggttcaaaattaattctttgtggattttctcaagttacatttatggcgtatacaacgtcgcatataacaacaaataaaaaggtagatgttctcgtttccaaaaaatgtatagatgaactagtcgatccaataaattatcaaatacttcaaaatttatttgataaaggaagcggaacaataaacaaaatactcaggaagatattttattcggtaacaggtggccaaactccataggtagctttttctatttcggattttagaatttccaaattcaccagcgatttatcggttttggtgaaatccaaggatttattaatgtccacaaatgccatttgttttgtctgtggattgtatttgaaaatggaaacgatgtagttagatagatgcgctgcgaagtttcctattagggttccgcgcttcacgtcacccagcatacttgaatcaccatcctttaaaaaaaatgataagatatcaacatggagtatatcatactcggattttaattcttctactgcatcactgacattttcacaaatactacaatacggtttaccgaaaataatcagtacgttcttcatttatgggtatcaaaaacttaaaatcgttactgctggaaaataaatcactgacgatattagatgataatttatacaaagtatacaatggaatatttgtggatacaatgagtatttatatagccgtcgccaattgtgtcagaaacttagaagagttaactacggtattcataaaatacgtaaacggatgggtaaaaaagggagggcatgtaaccctttttatcgatagaggaagtataaaaattaaacaagacgttagagacaagagacgtaaatattctaaattaaccaaggacagaaaaatgttagaattagaaaagtgtacatccgaaatacaaaatgttaccggatttatggaagaagaaataaaggcagaaatgcaattaaaaatcgataaactcacatttcaaatatatttatctgattctgataacataaaaatatcattgaatgagatactaacacatttcaacaataatgagaatgttacattattttattgtgatgaacgagacgcagaattcgttatgtgtctcgaggctaaaacacatttctctaccacaggagaatggccgttgataataagtaccgatcaggatactatgctatttgcatctgctgataatcatcctaagatgataaaaaacttaactcaactgtttaaatttgttccctcggcagaggataactatttagcaaaattaacggcgttagtgaatggatgtgatttctttcctggactctatggggcatctataacacccaccaacttaaacaaaatacaattgtttagtgattttacaatcgataatatagtcactagtttggcaattaaaaattattatagaaagactaactctaccgtagacgtgcgtaatattgttacgtttataaacgattacgctaatttagacgatgtctactcgtatattcctccttgtcaatgcactgttcaagaatttatattttccgcattagatgaaaaatggaatgaatttaaatcatcttatttagaaagcgtgccgttaccctgccaattaatgtacgcgttagaaccacgcaaggagattgatgtttcagaagttaaaactttatcatcttatatagatttcgaaaatactaaatcagatatcgatgttataaaatctatatcctcgatcttcggatattctaacgaaaactgtaacacgatagtattcggcatctataaggataatttactactgagtataaataattcattttactttaacgatagtctgttaataaccaatactaaaagtgataatataataaatataggttactagattaaaaatggtgttccaactcgtgtgctctacatgcggtaaagatatttctcacgaacgatataaattgattatacgaaaaaaatcattaaaggatgtactcgtcagtgtaaagaacgaatgttgtaggttaaaattatctacacaaatagaacctcaacgtaacttaacagtgcaacctctattggatataaactaatatggatccggttaattttatcaagacatatgcgcctagaggttctattatttttattaattataccatgtcattaacaagtcatttgaatccatcgatagaaaaacatgtgggtatttattatggtacgttattatcggaacacttggtagttgaatcaacatatagaaaaggagttcgaatagtcccattggatagtttttttgaaggatatcttagtgcaaaagtatacatgttagagaatattcaagttatgaaaatagcagctgatacgtcattaactttattgggtattccgtatggatttggtcataatagaatgtattgttttaaattggtagctgactgttataaaaatgccggtattgatacatcgtctaaacgaatattgggcaaagatatttttctgagccaaaacttcacagacgataatagatggataaagatatatgattctaataatttaacattttggcaaattgattaccttaaagggtgagttaatatgcataactactcctccgttgttttttccctcgttctttttcttaacgttgtttgccatcactctcataatgtaaagatattctaaaatggtaaacttttgcatatcggacgcagaaattggtataaatgttgtaattgtattatttcccgtcaatggactagtcacagctccatcagttttatatcctttagagtatttctcactcgtgtctaacattctagagcattccatgatctgtttatcgttgatattggccggaaagatagattttttattttttattatattactattggcaattgtagatataacttctggtaaatatttttctaccttttcaatctcttctattttcaagccggctatatattctgctatattgttgctagtatcaataccttttctggctaagaagtcatatgtggtattcactatatcagttttaactggtagttccattagcctttccacttctgcagaataatcagaaattggttctttaccagaaaatccagctactataataggctcaccgatgatcattggcaaaatcctatattgtaccagattaatgagagcatatttcatttccaataattctgctagttcttgagacattgatttatttgatgaatctagttggttctctagatactctaccatttctgccgcatacaataacttgttagataaaatcagggttatcaaagtgtttagcgtggctagaatagtgggcttgcatgtattaaagaatgcggtagtatgagtaaaccgttttaacgaattatatagtctccagaaatctgtggcgttacatacatgagccgaatgacatcgaagattgtccaatatttttaatagctgctctttgtccattatttctatatttgactcgcaacaattgtagataccattaatcaccgattcctttttcgatgccggacaatagcacaattgtttagctttggactctatgtattcagaattaatagatatatctctcaatacagattgcactatacattttgaaactatgtcaaaaattgtagaacgacgctgttctgcagccatttaactttaaataatttacaaaaatttaaaatgagcatccgtataaaaatcgataaactgcgccaaattgtggcatatttttcagagttcagtgaagaagtgtctataaatgtagactcgacggatgagttaatgtatatttttgccgccttgggcggatctgtaaacatttgggcaattatacctctaagtgcatcagtgttttaccgaggagccgaaaatattgtgtttaatcttcctgtgtccaaggtaaaatcgtgtttgtgtagttttcacaatgatgccatcatagatatagaacctgatctggaaaataatctagtaaaactttctagttatcatgtagtaagtgtcgattgtaacaaggaactgatgcctattaggacagatactactatttgtctaagtatagatcaaaagaaatcttacgtgtttaattttcacaagtatgaagaaaaatgttgtggtagaaccgtcattcatctagaatggttgttgggctttatcaagtgtattagtcagcatcagcatctggctattatgtttaaagatgacaatattattatgaagactcctggtaatactgatgcgttttccagggaatattctatgactgaatgttctcaagaactacaaaagttttctttcaaaatagctatctcgtctctcaacaaactacgaggattcaaaaagagagtcaatgtttttgaaactagaatcgtaatggataatgacgataacattttaggaatgttgttttcggatagagttcaatcctttaagatcaacatctttatggcgtttttagattaatactttcaatgagataaatatgggtggcggagtaagtgttgagctccctaaacgggatccgcctccgggagtacccactgatgagatgttattaaacgtggataaaatgcatgacgtgatagctcccgctaagcttttagaatatgtgcatataggaccactagcaaaagataaagaggataaagtaaagaaaagatatccagagtttagattagtcaacacaggacccggtggtctttcggcattgttaagacaatcgtataatggaaccgcacccaattgctgtcgcacttttaatcgtactcattattggaagaaggatggaaagatatcagataagtatgaagagggtgcagtattagaatcgtgttggccagacgttcacgacactggaaaatgcgatgttgatttattcgactggtgtcagggggatacgttcgatagaaacatatgccatcagtggatcggttcagcctttaataggagtaatagaactgtagagggtcaacaatcgttaataaatctgtataataagatgcaaacattatgtagtaaagatgctagtgtaccaatatgcgaatcatttttgcattatttacgcgcacacaatacagaagatagcaaagagatgatcgattatattctaagacaacagtctgcggactttaaacagaaatatatgagatgtagttatcccactagagataagttagaagagtcattaaaatatgcggaacctcgagaatgttgggatccagagtgttcgaatgccaatgttaatttcttactaacacgtaattataataatttaggactttgcaatattgtacgatgtaataccagcgtgaacaacttacagatggataaaacttcctcattaagattgtcatgtggattaagcaatagtgatagattttctactgttcccgtcaatagagcaaaagtagttcaacataatattaaacactcgttcgacctaaaattgcatttgatcagtttattatctctcttggtaatatggatactaattgtagctatttaaatgggtgccgcggcaagcatacagacgacggtgaatacactcagcgaacgtatctcgtctaaattagaacaagaagcgaatgctagtgctcaaacaaaatgtgatatagaaatcggaaatttttatatccgacaaaaccatggatgtaacctcactgttaaaaatatgtgctctgcggacgcggatgctcagttggatgctgtgttatcagccgctacagaaacatatagtggattaacaccggaacaaaaagcatacgtgccagctatgtttactgctgcgttaaacattcagacgagtgtaaacactgttgttagagattttgaaaattatgtgaaacagacttgtaattctagcgcggtcgtcgataacaaattaaagatacaaaacgtaatcatagatgaatgttacggagccccaggatctccaacaaatttggaatttattaatacaggatctagcaaaggaaattgtgccattaaagcgttgatgcaattgacgactaaggccactactcaaatagcacctagacaagttgctggtacaggagttcagttttatatgattgttatcggtgttataatattggcagcgttgtttatgtactatgccaagcgtatgctgttcacatccaccaatgataaaatcaaacttattttagccaataaggaaaacgtccattggactacttacatggacacattctttagaacttctccgatggttattgctaccacggatatgcaaaactgaaaatatattgataatattttaatagattaacatggaagttatcgctgatcgtctagacgatatagtgaaacaaaatatagcggatgaaaaatttgtagattttgttatacacggtctagagcatcaatgtcctgctatacttcgaccattaattaggttgtttattgatatactattatttgttatagtaatttatatttttacggtacgtctagtaagtagaaattatcaaatgttgttggtggtgctagtcatcacattaactattttttattactttatactataatagtactagactgacttctaacaaacatctcacctgccataaataaatgcttgatattaaagtcttctatttctaacactattccatctgtggaaaataatactctgacattatcgctaattgacacatcggtgagtgatatgcctataaagtaataatcttctttgggcacatataccagtgtaccaggttctaacaacctatttactggtgctcctgtagcatactttttctttaccttgagaatatccatcgtttgcttggtcaatagcgatatgtgattttttatcaaccactcgaaaaagtaattggagtgttcatatcctctacgggctattgtctcatggccgtgtatgaaatttaagtaacacgactgtggtagatttgttctatagagccggttgccgcaaatagatagaactaccaatatgtctgtacaaatgttaaacattaattgattaacagaaaaaacaatgttcgttctgggaatagaaaccagatcaaaacaaaattcgttagaatatatgccacgtttatacatggaatataaaataactacagtttgaaaaataacagtatcatttaaacatttaacttgcggggttaatctcacaactttactgtttttgaactgttcaaaatatagcatcgatccgtgagaaatacgtttagccgcctttaatagaggaaatcccaccgcctttctggatctcaccaacgacgatagttctgaccagcaactcatttcttcatcatccacctgttttaacatataataggcaggagatagatatccgtcattgcaatattccttctcgtaggcacacaatctaatattgataaaatctccattctcttctctgcatttattatcttgtctcggtggctgattaggctgtggtcttggtttaggccttggtctatcgttgttgaatctattttggtcattaaatctttcatttcttcctggtatatttctatcacctcgtttggttggatttttgtctatattatcgtttgtaacatcggtacgggtattcatttatcacaaaaaaaacttctctaaatgagtctactgctagaaaacctcatcgaagaagataccatattttttgcaggaagtatatctgagtatgatgatttacaaatggttattgccggcgcaaaatccaaatttccaagatctatgctttctatttttaatatagtacctagaacgatgtcaaaatatgagttggagttgattcataacgaaaatatcacaggagcaatgtttaccacaatgtataatataagaaacaatttgggtctaggagatgataaactaactattgaagccattgaaaactatttcttggatcctaacaatgaagttatgcctcttattattaataatacggatatgactgccgtcattcctaaaaaaagtggtaggagaaagaataagaacatggttatcttccgtcaaggatcatcacctatcttgtgcattttcgaaactcgtaaaaagattaatatttataaagaaaatatggaatccgcgtcgactgagtatacacctatcggagacaacaaggctttgatatctaaatatgcgggaattaatgtcctgaatgtgtattctccttccacatccataagattgaatgccatttacggattcaccaataaaaataaactagagaaacttagtactaataaggaactagaatcgtatagttctagccctcttcaagaacccattaggttaaatgattttctgggactattggaatgtgttaaaaagaatattcctctaacagatattccgacaaaggattgattactataaatggagaatgttcctaatgtatactttaatcctgtgtttatagagcccacgtttaaacattctttattaagtgtttataaacacagattaatagttttatttgaagtattcattgtattcattctaatatatgtattttttagatctgaattaaatatgttcttcatgcctaaacgaaaaatacccgatcctattgatagattacgacgtgctaatctagcgtgtgaagacgataaattaatgatctatggattaccatggatgacaactcaaacatctgcgttatcaataaatagtaaaccgatagtgtataaagattgtgcaaagcttttgcgatcaataaatggatcacaaccagtatctcttaacgatgttcttcgcagatgatgattcattttttaagtatttggctagtcaagatgatgaatcttcattatctgatatattgcaaatcactcaatatctagactttctgttattattattgatccaatcaaaaaataaattagaagctgtgggtcattgttatgaatctctttcagaggaatacagacaattgacaaaattcacagactttcaagattttaaaaaactgtttaacaaggtccctattgttacagatggaagggtcaaacttaataaaggatatttgttcgactttgtgattagtttgatgcgattcaaaaaagaatcctctctagctaccaccgcaatagatcctgttagatacatagatcctcgtcgtgatatcgcattttctaacgtgatggatatattaaagtcgaataaagtgaacaataattaattctttattgtcatcatgaacggcggacatattcagttgataatcggccccatgttttcaggtaaaagtacagaattaattagacgagttagacgttatcaaatagctcaatataaatgcgtgactataaaatattctaacgataatagatacggaacgggactatggacgcatgataagaataattttgaagcattggaagcaactaaactatgtgatgtcttggaatcaattacagatttctccgtgataggtatcgatgaaggacagttctttccagacattgtttaattctgtgagcgtatggcaaacgaaggaaaaatagttatagtagccgcactcgatgggacatttcaacgtaaaccgtttaataatattttgaatcttattccattatctgaaatggtggtaaaactaactgctgtgtgtatgaaatgctttaaggaggcttccttttctaaacgattgggtgaggaaaccgagatagagataataggaggtaatgatatgtatcaatcggtgtgtagaaagtgttacgtcggctcataatattatattttttatctaaaaaactaaaaataaacattgattaaattttaatataatacttaaaaatggatgttgtgtcgttagataaaccgtttatgtattttgaggaaattgataatgagttagattacgaaccagaaagtgcaaatgaggtcgcaaaaaaactgccgtatcaaggacagttaaaactattactaggagaattattttttcttagtaagttacagcgacacggtatattagatggtgccaccgtagtgtatataggatcggctcctggtacacatatacgttatttgagagatcatttctataatttaggagtgatcatcaaatggatgctaattgacggccgccatcatgatcctattctaaatggattgcgtgatgtgactctagtgactcggttcgttgatgaggaatatctacgatccatcaaaaaacaactgcatccttctaagattattttaatttctgatgtgagatccaaacgaggaggaaatgaacctagtacggcggatttactaagtaattacgctctacaaaatgtcatgattagtattttaaaccccgtggcgtctagtcttaaatggagatgcccgtttccagatcaatggatcaaggacttttatatcccacacggtaataaaatgttacaaccttttgctccttcatattcagctgaaatgagattattaagtatttataccggtgagaacatgagactgactcgagttaccaaattagacgctgtaaattatgaaaaaaagatgtactaccttaataagatcgtccgtaacaaagtagttgttaactttgattatcctaatcaggaatatgactattttcacatgtactttatgctgaggaccgtgtactgcaataaaacatttcctactactaaagcaaaggtactatttctacaacaatctatatttcgtttcttaaatattccaacaacatcaactgaaaaagttagtcatgaaccaatacaacgtaaaatatctagcaaaaattctatgtctaaaaacagaaatagcaagagatccgtacgcggtaataaatagaaacgtactactgagatatactaccgatatagagtataatgatttagttactttaataaccgttagacataaaattgattctatgaaaactgtgtttcaggtatttaacgaatcatccataaattatactccggttgatgatgattatggagaaccaatcattataacatcgtatcttcaaaaaggtcataacaagtttcctgtaaattttctatacatagatgtggtaatatctgacttatttcctagctttgttagactagatactacagaaactaatatagttaatagtgtactacaaacaggcgatggtaaaaagactcttcgtcttcccaaaatgttagagacggaaatagttgtcaagattctctatcgccctaatataccattaaaaattgttagatttttccgcaataacatggtaactggagtagagatagccgatagatctgttatttcagtcgctgattaatcaattagtagagatgagataagaacattataataatcaataatatatcttatatcttatatcttatatcttatatcttgtttagaaaaatgctaatattaaaatagctaacgctagtaatccaatcggaagccatttgatatctataatagggtatctaatttcctgatttaaatagcggacagctatattctcggtagctactcgtttggaatcacaaacattatttacatctaatttactatctgtaatggaaacgtttcccaatgaaatggtacaatccgatacattgcattttgttatatttttttttaaagaggctggtaacaacgcatcgcttcgtttacatggctcgtaccaacaataatagggtaatcttgtatctattcctatccgtactatgcttttatcaggataaatacatttacatcgtatatcgtctttgttagcatcacagaatgcataaatttgttcgtccgtcatgataaaaatttaaagtgtaaatataactattatttttatagttgtaataaaaagggaaatttgattgtatactttcggttctttaaaagaaactgacttgataaaaatggctgtaatctctaaggttacgtatagtctatatgatcaaaaagagattaatgctacagatattatcattagtcatgttaaaaatgacgacgatatcggtaccgttaaagatggtagactaggtgctatggatggggcattatgtaaaacttgtgggaaaacggaattggaatgtttcggtcactggggtaaagtaagtatttataaaactcatatagttaagcctgaatttatttcagaaattattcgtttactgaatcatatatgtattcactgcggattattgcgttcacgagaaccgtattccgacgatattaacctaaaagagttatcgggacacgctcttaggagattaaaggataaaatattatccaagaaaaagtcatgttggaacagtgaatgtatgcaaccgtatcaaaaaattactttttcaaagaaaaaggtttgtttcgtcaacaagttggatgatattaacgttcctaattctctcatctatcaaaagttaatttctattcatgaaaagttttggccattattagaaattcatcaatatccagctaacttattttatacagactactttcccatccctccgttgattattagaccggctattagtttttggatagatagtatacccaaagagaccaatgaattaacttacttattaggtatgatcgttaagaattgtaacttgaatgctgatgaacaggttatccagaaggcggtaatagaatacgatgatattaaaattatttctaataacactaccagtatcaatttatcatatattacatccggcaaaaataatatgattagaagttatatcgtcgcccgacgaaaagatcagaccgctagatctgtaattggtcccagtacatctatcaccgttaatgaggtaggaatgcccgcatatattagaaatacacttacagaaaagatatttgttaatgcctttacagtggataaagttaaacaactattagcgtcaaaccaagttaaattttactttaataaacgattaaaccaattaacaagaatacgccaaggaaagtttattaaaaataaaatacatttattgcctggtgattgggtagaagtagctgttcaagaatatacaagtattatttttggaagacagccgtctctacatagatacaacgtcatcgcttcatctatcagagctaccgaaggagatactatcaaaatatctcccggaattgccaactctcaaaatgctgatttcgacggggatgaggaatggatgatattagaacaaaatcctaaagctgtaattgaacaaagtattcttatgtatccgacgacgttactcaaacacgatattcatggagcccccgtttatggatctattcaagatgaaatcgtagcagcgtattcattgtttaggatacaagatctttgtttagatgaagtattgaacatcttggggaaatatggaagagagttcgatcctaaaggtaaatgtaaattcagcggtaaagatatctatacttacttgataggtgaaaagattaattatccgggtctcttaaaggatggtgaaattattgcaaacgacgtagatagtaattttgttgtggctatgaggcatctgtcattggctggactcttatccgatcataagtcgaacgtggaaggtatcaactttattatcaagtcatcttatgtttttaagagatatctatctatttacggttttggggtgacattcaaagatctgagaccaaattcgacgttcactaataaattggaggccatcaacgtagaaaaaatagaacttatcaaagaagcatacgccaaatatctcaacgatgtaagagacgggaaaatagttccattatctaaagctttagaggcggactatgtggaatccatgttatccaacttgacaaatcttaatatccgagagatagaagaacatatgagacaaacgctgatagatgatccagataataacctcctgaaaatggccaaagcgggttataaagtaaatcccacagaactaatgtatattctaggtacgtatggacaacaaaggattgatggtgaaccagcagagactcgagtattgggtagagttttaccttactatcttccagactctaaggatccagaaggaagaggttatattcttaattctttaacaaaaggattaacgggttctcaatattacttttcgatgctggttgcaagatctcaatctactgatatcgtctgtgaaacatcacgtaccggaacactggctagaaaaatcattaaaaagatggaggatatggtggtcgacggatacggacaagtagttataggtaatacgctcatcaagtacgccgccaattataccaaaattctaggctcagtatgtaaacctgtagatcttatctatccagatgagtccatgacttggtatttggaaattagtgctctgtggaataaaataaaacagggattcgtttactctcagaaacagaaacttgcaaagaagacattggcgccgtttaatttcctagtattcgtcaaacccaccactgaggataatgctattaaggttaaggatctgtacgatatgattcataacgtcattgatgatgtgagagagaaatacttctttacggtatctaatatagattttatggagtatatattcttgacgcatcttaatccttctagaattagaattacaaaagaaacggctatcactatctttgaaaagttctatgaaaaactcaattatactctaggtggtggaactcctattggaattatttctgcacaggtattgtctgagaagtttacacaacaagccctgtccagttttcacactactgaaaaaagtggtgccgtcaaacaaaaacttggtttcaacgagtttaataacttgactaatttgagtaagaataagaccgaaattatcactctggtatccgatgatatctctaaacttcaatctgttaagattaatttcgaatttgtatgtttgggagaattaaatccagacatcactcttcgaaaagaaacagataggtatgtagtagatataatagtcaatagattatacatcaagagagcagaaataaccgaattagtcgtcgaatatatgattgaacgatttatctcctttagcgtcattgtaaaggaatggggtatggaaacattcattgaggatgaggataatattagatttactgtctacctaaatttcgttgaaccggaagaattgaatcttagtaagtttatgatggttcttccgggtgccgccaacaagggaaagattagtaaattcaagattcctatctctgactatacgggttatgacgacttcaatcaaacaaaaaagctcaataagatgactgtagaactcatgaatctaaaagaattgggttctttcgatttggaaaacgtcaacgtgtatcctggagtatggaatacatacgatatcttcggtatcgaggccgctcgtgaatacttgtgcgaagccatgttaaacacctatggagaagggttcgattatctgtatcagccttgtgatcttctcgctagtttactatgtgctagttacgaaccagaatcagtgaataaattcaagttcggcgcagctagtactcttaagagagctacgttcggagacaataaagcattgttaaacgcggctcttcataaaaagtcagaacctattaacgataatagtagctgccacttttttagcaaggtccctaatataggaactggatattacaaatactttatcgacttgggtcttctcatgagaatggaaaggaaactatctgataagatatcttctcaaaagatcaaggaaatggaagaaacagaagacttttaattcttatcaataacatatttttctatgatctgtcttttaaacgatggattttccacaaatgcgcctctcaagtccctcatagaatgatacacgtataaaaaatatagcataggcgatgactccttatttttagacattagatatgccaaaatcatagccccgcttctatttactcccgcagcacaatgaaccaacacgggctcgtttcgttgatcacatttagataaaaaggcggttacgtcgtcaaaatatttactaatatcggtagttgtatcatctaccaacggtatatgaataatattaatattagagttaggtaatgtatatttatccatcgtcaaatttaaaacatatttgaacttaacttcagatgatggtgcatccatagcatttttataatttcccaaatacacattattggttacccttgtcattatagtgggagatttggctctgtgcatatctccagttgaacgtagtagtaagtatttatacaaacttttcttatccatttataacgtacaaatggataaaactactttatcggtaaacgcgtgtaatttagaatacgttagagaaaaggctatagtaggcgtacaagcagccaaaacatcaacacttatattctttgttattatattggcaattagtgcgctattactctggtttcagacgtctgataatccagtctttaatgaattaacgagatatatgcgaattaaaaatacggttaacgattggaaatcattaacggatagcaaaacaaaattagaaagtgatagaggtaaacttctagccgctggtaaggatgatatattcgaattcaaatgtgtggatttcggcgcctattttatagctatgcgattggataagaaaacatatctgccgcaagctattaggcgaggtactggagacgcgtggatggttaaaaaggcggcaaaggtcgatccatctgctcaacaattttgtcagtatttgataaaacacaagtctaataatgttattacttgtggtaatgagatgttaaatgaattaggttatagcggttattttatgtcaccgcattggtgttccgattttagtaatatggaatagtgttagataaatgcggtaacgaatgttcctgtaaggaaccataacagtttagatttaacgttaaagatgagcataaacataataaacaaaattacaatcaaacttataacattaatatcaaacaatccaaaaaatgaaatcagtggagtagtaaacgcgtacataactcctggataacgtttagcagctgccgttcctattctagaccaaaaatttggtttcatgttttcgaaacggtattctgcaacaagtcggggatcgtgttctacatatttggcggcattatccagtatctgcctattgatcttcatttcgttttcgattctggctatttcaaaataaaatcccgatgatagacctccagactttataatttcatctacgatgttcagcgccgtagtaactctaataatataggctgataagctaacatcataccctcctgtatatgtgaatatggcatgatttttgtccattacaagctcggttttaactttattgcctgtaataatttctctcatctgtaggatatctatttttttgtcatgcattgccttcaagacgggacgaagaaacgtaatatcctcaataacgttatcgttttctacaataactacatattctacctttttattttctaactcggtaaaaaaattagaatcccatagggctaaatgtctagcgatatttcttttcgtttcttctgtacacatagtgttacaaaaccctgaaaagaagtgagtatacttgtcatcatttctaatgtttcctccagtccactgtataaacgcataatccttgtaatgatctggatcatccttgactaccacaacatttcttttttctggcataacttcgttgtcctttacatcatcgaacttctgatcattaatatgctcatgaacattaggaaatgtttctgatggaggtctatcaataactggcacaacaataacaggagttttcaccgccgccatttagttattgaaattaatcatatacaactctttaatacgagttatattttcgtctatccattgtttcacattgacatatttcgacaaaaagatataaaatgcgtattccaatgcttctctgtttaatgaattactaaaatatacaaacacgtcactgtctggcaataaatgatatcttagaatattgtaacaatttattttgtattgcacatgttcgtgatctatgagttcttcttcgaatggcataggatctccgaatctgaaaacgtataaataggagttagaataataatatttgagagtattggtaatatataaactctttagcggtataattagtttttttctctcaatttctatttttagatgtgatggaaaaatgactaattttgtagcattagtatcatgaactctaatcaaaatcttaatatcttcgtcacacgttagctctttgaagtttttaagagatgcatcagttggttctacagatggagtaggtgcaacaattttttgttctacacatgtatgtactggagccattgttttaactataatggtgcttgtatcgaaaaactttaatgcagatagcggaagctcttcgccgcgactttctacgtcgtaattgggttctaacgccgatctctgaatggatactagttttctaagttctaatgtgattctctgaaaatgtaaatccaattcctccggcattatagatgtgtatacatcggtaaataaaactatagtatccaacgatcccttctcgcaaattctagtcttaaccaaaaaatcgtatataaccacggagatggcgtatttaagagtggattcttctaccgttttgttcttggatgtcatataggaaactataaagtccgcactactgttaagaatgattactaacgcaactatatagtttaaattaagcattttggaaacataaaataactctgtagacgatacttgactttcgaataagtttgcagacaaacgaagaaagaacagacctctcttaatttcagaagaaaactttttttcgtattcctgacgtctagagtttatatcaataagaaagttaagaattagtcggttaatgttgtatttcattacccaagtttgagatttcataatattatcaaaagacatgataatattaaagataaagcgctgactatgaacgaaatagctatatggttcgctcaagaatatagtcttgttaaacgtggaaacgataactgtatttttaatcacgtcagcggcatctaaattaaatataggtatatttattccacacactctacaatatgccacaccatcttcataataaataaattcgttagcaaaattattaattttagtgaaatagttagcgtcaactttcatagcttccttcaatctaatttgatgctcacacggtgcgaattccactctaacatcccttttccatgcctcaggttcatcgatctctataatatctagttttttgcgtttcacaaacacaggctcgtctctcgcgatgagatctgtatagtaactatgtaaatgataactagatagaaagatgtagctatatagatgacgatcctttaagagaggtataataactttaccccaatcagatagactgttgttatggtcttcggaaaaagaatttttataaatttttccagtattttccaaatatacgtacttaacatctaaaaaatccttaatgataataggaatggataatccgtctattttataaagaaatacatatcgcacattatacttttttttggaaatgggaataccgatgtgtctacataaatatgcaaagtctaaatattttttagagaatcttagttggtccaaattcttttccaagtacggtaatagatttttcatattgaacggtatcttcttaatctctggttctagttccgcattaaatgatgaaactaagtcactatttttataactaacgattacatcacctctaacatcatcatttaccagaatactgatcttcttttgtcgtaaatacatgtctaatgtgttaaaaaaaagatcatacaagttatacgtcatttcatctgtggtattcttgtcattgaaggataaactcgtactaatctcttctttaacagcctgttcaaatttatatcctatatacgaaaaaatagcaaccagtgtttgatcatccgcgtcaatattctgttctatcgtagtgtataacaatcgtatatcttcttctgtgatagtcgatacgttataaaggttgataacgaaaatatttttatttcgtgaaataaagtcatcgtaggattttggacttatatttgcgtctagtagatatgcttttatttttggaatgatctcaattagaatagtctctttagagtccatttaaagttacaaacaactaggaaattggtttatgatgtataatttttttagtttttatagattctttattctatacttaaaaaatgaaaataaatacaaaggttcttgagggttgtgttaaattgaaagcgagaaataatcataaattatttcattatcgcgatatccgttaagtttgtatcgtaatggcgtggtcaattacaaataaagcggatactagtagcttcacaaagatggctgaaatcagagctcatctaaaaaatagcgctgaaaataaagataaaaacgaggatattttcccggaagatgtaataattccatctactaagcccaaaaccaaacgagccactactcctcgtaaaccagcggctactaaaagatcaaccaaaaaggaggaagtggaagaagaagtagttatagaggaatatcatcaaacaactgaaaaaaattctccatctcctggagtcagcgacattgtagaaagcgtggccgctgtagagctcgatgatagcgacggggatgatgaacctatggtacaagttgaagctggtaaagtaaatcatagtgctagaagcgatctctctgacctaaaggtggctaccgacaatatcgttaaagatcttaagaaaattattactagaatctctgcagtatcgacggttctagaggatgttcaagcagctggtatctctagacaatttacttctatgactaaagctattacaacactatctgatctagtcaccgagggaaaatctaaagttgttcgtaaaaaagttaaaacttgtaagaagtaaatgcgtgcacttttttataaagatggtaaactctttaccgataataattttttaaatcctgtatcagacgataatccagcgtatgaggttttgcaacatgttaaaattcctactcatttaacagatgtagtagtatatgaacaaacgtgggaggaggcgttaactagattaatttttgtgggaagcgattcaaaaggacgtagacaatacttttacggaaaaatgcatgtacagaatcgcaacgctaaaagagatcgtatttttgttagagtatataacgttatgaaacgaattaattgttttataaacaaaaatataaagaaatcgtccacagattccaattatcagttggcggtttttatgttaatggaaactatgttttttattagatttggtaaaatgaaatatcttaaggagaatgaaacagtagggttattaacactaaaaaataaacacatagaaataagtcccgatgaaatagttatcaagtttgtaggaaaggacaaagtttcacatgaatttgttgttcataagtctaatagactatataaaccgctattgaaactgacggatgattctagtcccgaagaatttctgttcaacaaactaagtgaacgaaaggtatacgaatgtatcaaacagtttggtattagaatcaaggatctccgaacgtatggagtcaattatacgtttttatataatttttggacaaatgtaaagtccatatctcctcttccgtcaccaaaaaagttaatagcgttaactatcaaacaaactgctgaagtggtaggtcatactccatcaatttcaaaaagagcttatatggcaacgactattttagaaatggtaaaggataaaaattttttagatgtagtatctaaaactacgttcgatgaattcctatctatagtcgtagatcacgttaaatcatctacggatggatgatatagatctttacacaaataattacaagaccgataaatggaaatggataagcgtatgaaatctctcgcaatgacagctttcttcggagagctaagcacattagatattatggcattgataatgtctatatttaaacgccatccaaacaataccattttttcagtggataaggatggtcagtttatgattgatttcgaatacgataattataaggcttctcaatatttggatctgaccctcactccgatatctggagatgaatgcaagactcacgcatcgagtatagccgaacaattggcgtgtgtggatattattaaagaggatattagcgaatatatcaaaactactccccgtcttaaacgatttataaaaaaataccgcaatagatcagatactcgcatcagtcgagatacagaaaagcttaaaatagctctagctaaaggcatagattacgaatatataaaagacgcttgttaataagtaaatgaaaaaaaactagtcgtttataataaaacacgatatggatgccaacgtagtatcatcttctactattgcgacgtatatagacgctttagcgaagaatgcttcagaattagaacagaggtctaccgcatacgaaataaataatgaattggaactagtatttattaagccgccattgattactttgacaaatgtagtgaatatctctacgattcaggaatcgtttattcgatttaccgttactaataaggaaggtgttaaaattagaactaagattccattatctaaggtacatggtctagatgtaaaaaatgtacagttagtagatgctatagataacatagtttgggaaaagaaatcattagtgacggaaaatcgtcttcacaaagaatgcttgttgagactatcgacagaggaacgtcatatatttttggattacaagaaatatggatcctctatccgactagaattagtcaatcttattcaagcaaaaacaaaaaactttacgatagactttaagctaaaatattttctaggatccggtgcccaatctaaaagttctttgttgcacgctattaatcatccaaagtcaaggcctaatacatctctggaaatagaattcacacctagagacaatgaaacagttccatatgatgaactaataaaggaattgacgactctctcgcgtcatatatttatggcttctccagagaatgtaattctttctccgcctattaacgcgcctataaaaacctttatgttgcctaaacaagatatagtaggtttggatctggaaaatctatatgccgtaactaagactgacggcattcctataactatcagagttacatcaaacgggttgtattgttattttacacatcttggttatattattagatatcctgttaagagaataatagattccgaagtagtagtctttggtgaggcagttaaggataagaactggaccgtatatctcattaagctaatagagcccgtgaatgctatcagtgatagactagaagaaagtaagtatgttgaatctaaactagtggatatttgtgatcggatagtattcaagtcaaagaaatacgaaggtccgtttactacaactagtgaagtcgtcgatatgttatctacatatttaccaaagcaaccagaaggtgttattctgttctattcaaagggacctaaatctaacattgattttaaaattaaaaaggaaaatactatagaccaaactgcaaatgtagtatttaggtacatgtccagtgaaccaattatctttggagaatcgtctatctttgtagagtataagaaatttagcaacgataaaggctttcctaaagaatatggttctggtaagattgtgttatataacggcgttaattatctaaataatatctattgtttggaatatattaatacacataatgaagtgggtattaagtccgtggttgtacctattaagtttatagcagaattcttagttaatggagaaatacttaaacctagaattgataaaaccatgaaatatattaactcagaagattattatggaaatcaacataatatcatagtcgaacatttaagagatcaaagcatcaaaataggagatatctttaacgaggataaactatcggatgtgggacatcaatacgccaataatgataaatttagattaaatccagaagttagttattttacgaataaacgaactagaggaccgttgggaattttatcaaactacgtcaagactcttcttatttctatgtattgttccaaaacatttttagacgattccaacaaacgaaaggtattggcgattgattttggaaacggtgctgacctggaaaaatacttttatggagagattgcgttattggtagcgacggatccggatgctgatgctatagctagaggaaatgaaagatacaacaaattaaactctggaattaaaaccaagtactacaaatttgactacattcaggaaactattcgatccgatacatttgtctctagtgtcagagaagtattctattttggaaagtttaatatcatcgactggcagtttgctatccattattcttttcatccgagacattatgctaccgtcatgaataacttatccgaactaactgcttctggaggcaaggtattaatcactaccatggacggagacaaattatcaaaattaacagataaaaagacttttataattcataagaatttacctagtagcgaaaactatatgtctgtagaaaaaatagctgatgatagaatagtggtatataatccatcaacaatgtctactccaatgactgaatacattatcaaaaagaacgatatagtcagagtgtttaacgaatacggatttgttcttgtagataacgttgatttcgctacaattatagaacgaagtaaaaagtttattaatggcgcatctacaatggaagatagaccgtctacaaaaaactttttcgaactaaatagaggagccattaaatgtgaaggtttagatgtcgaagacttacttagttactatgttgtttatgtcttttctaagcggtaaataataatatggtatgggttctgatatccccgttctaaatgcattaaataattccaatagagcgatttttgttcctataggaccttccaactgtggatactctgtattgttaatagatatattaatacttttgtcgggtaacagaggttctacgtcttctaaaaataaaagtttgataacatctggcctgttcataaataaaaacttggcgattctatatatactcttattatcaaatctagccattgtcttatagatgtgagctactgtaggtgtaccatttgattttctttctaatactatatatttctctcgaagaagttcttgcacatcatctgggaataaaatactactgttgagtaaatcagttattttttttatatcgatattgatggacatttttatagttaaggataataagtatcccaaagtcgataacgacgataacgaagtatttatacttttaggaaatcacaatgactttatcagattaaaattaacaaaattaaaggagcatgtatttttttctgaatatattgtgactccagatacatatggatctttatgcgtcgaattaaatgggtctagttttcagcacggtggtagatatatagaggtggaggaatttatagatgctggaagacaagttagatggtgttctacatccaatcatatatctaaagatatacccgaagatatgcacactgataaatttgtcatttatgatatatacacttttgacgctttcaagaataaacgattggtattcgtacaggtacctccgtcgttaggagatgatagtcatttgactaatccgttattgtctccgtattatcgtaattcagtagccagacaaatggtcaataatatgatttttaatcaagattcatttttaaaatatttattagaacatctgattagaagccactatagagtttctaaacatataacaatagttagatacaaggataccgaagaattaaatctaacgagaatatgttataatagagataagtttaaggcgtttgtattcgcttggtttaacggcgtttcggaaaatgaaaaggtactagatacgtataaaaaggtatctaatttgatataatgaattcagtgactgtatcacacgcgccatatactattacttatcacgatgattgggaaccagtaatgagtcaattggtagagttttataacgaagtagccagttggctgctacgagacgagacgtcgcctattcctgataagttctttatacagttgaaacaaccgcttagaaataaacgagtatgtgtgtgcggtatagatccgtatccgaaagatggaactggtgtaccgttcgaatcaccaaattttacaaaaaaatcaattaaggagatagcttcatctatatctagattaaccggagtaattgattataaaggttataaccttaatataatagacggggttataccctggaattattacttaagttgtaaattaggagaaacaaaaagtcacgcgatctactgggataagatttccaagttactgctgcagcatataactaaacacgttagtgttctttattgtttgggtaaaacagatttctcgaatatacgggcaaagttagaatccccggtaactaccatagtcggatatcatccagcggctagagaccgccaattcgagaaagatagatcatttgaaattatcaacgttttactggaattagacaacaaggcacctataaattgggctcaagggtttatttattaatgctttagtgaaattttaacttgtgttctaaatggatgcggctattagaggtaatgatgttatctttgttcttaagactataggtgtcccgtcagcgtgcagacaaaatgaagatccaagatttgtagaagcatttaaatgcgacgagttagaaagatatattgagaataatccagaatgtacactattcgaaagtcttagggatgaggaagcatactctatagtcagaattttcatggatgtagatttagacgcgtgtctagacgaaatagattatttaacggctattcaagattttattatcgaggtgtcaaactgtgtagctagattcgcgtttacagaatgcggtgccattcatgaaaatgtaataaaatccatgagatctaatttttcattgactaagtctacaaatagagataaaacaagttttcatattatctttttagacacgtataccactatggatacattgatagctatgaaacgaacactattagaattaagtagatcatctgaaaatccactaacaagatcgatagacactgccgtatataggagaaaaacaactcttcgggttgtaggtactaggaaaaatccaaattgcgacactattcatgtaatgcaaccaccgcatgataatatagaagattacctattcacttacgtggatatgaacaacaatagttattacttttctctacaacaacgattggaggatttagttcctgataagttatgggaaccagggtttatttcattcgaagacgctataaaaagagtttcaaaaatattcattaattctataataaactttaatgatctcgatgaaaataattttacaacggtaccactggtcatagattacgtaacaccttgtgcattatgtaaaaaacgatcgcataaacatccgcatcaactatcgttggaaaatggtgctattagaatttacaaaactggtaatccacatagttgtaaagttaaaattgttccgttggatggtaataaactgtttaatattgcacaaagaattttagacactaactctgttttattaaccgaacgaggagaccatatagtttggattaataattcatggaaatttaacagcgaagaacccttgataacaaaactaattttgtcaataagacatcaactacctaaggaatattcaagcgaattactctgtccgaggaaacgaaagactgtagaagctaacatacgagacatgttagtagattcagtggagaccgatacctatccggataaacttccgtttaaaaatggtgtattggacctggtagacggaatgttttactctggagatgatgctaaaaaatatacgtgtactgtatcaaccggatttaaatttgacgatacaaagttcgtcgaagacagtccagaaatggaagagttaatgaatatcattaacgatatccaaccattaacggatgaaaataagaaaaatagagagctatatgaaaaaacattatctagttgtttatgcggtgctaccaaaggatgtttaacattcttttttggagaaactgcaactggaaagtcgacaaccaaacgtttgttaaagtctgctatcggtgacctgtttgttgagacgggtcaaacaattttaacagatgtattggataaaggacctaatccatttatcgctaacatgcatttgaaaagatctgtattctgtagcgaactacctgattttgcatgtagtgggtcaaagaaaatcagatctgataatattaaaaagttgacagaaccttgtgtcattggaagaccgtgtttctccaataaaattaataatagaaaccatgcgacaatcattatcgatactaattacaaacctgtttttgataggatagataacgcattaatgagaagaattgccgtcgtgcgattcagaacacacttttctcaaccttctggtagagaggctgctgaaaataatgacgcgtacgataaagtcaaactattagacgaggggttagatggtaaaatacaaaataatagatatagattcgcatttctatacttgttggtgaaatggtacagaaaatatcatgttcctattatgaaactatatcctacacccgaagagattcctgactttgcattctatctcaaaataggtactctgttggtatctagctctgtaaagcatattccattaatgacggacctctccaaaaagggatatatattgtacgataatgtggtcactcttccgttgactactttccaacagaaaatatccaagtattttaattctagactatttggacacgatatagagagcttcatcaatagacataagaaatttgccaatgttagtgatgaatatctgcaatatatattcatagaggatatttcatctccgtaaatatatgctcatatatttatagaagatatcacatatctaaatgaataccggaatcatagatttatttgataatcatgttgatagtataccaactatattacctcatcagttagctactctagattatctagttagaactatcatagatgagaacagaagcgtgttattgttccatattatgggatcaggtaaaacaataatcgctttgttgttcgccttggtagcttccagatttaaaaaggtttacattctagtgccgaacatcaacatcttaaaaattttcaattataatatgggtgtagctatgaacttgtttaatgacgaattcatagctgagaatatctttattcattccacaacaagtttttattctcttaattataacgataacgtcattaattataacggattatctcgctacaataactctatttttatcgttgatgaggcacataatatctttgggaataatactggagaacttatgaccgtgataaaaaataaaaacaagattccttttttactattgtctggatctcccattactaacacacctaatactctgggtcatattatagatttaatgtccgaagagacgatagattttggtgaaattattagtcgtggtaagaaagtaattcagacacttcttaacgaacgcggtgtgaatgtacttaaggatttgcttaaaggaagaatatcatattacgaaatgcctgataaagatctaccaacgataagatatcacggacgtaagtttctagatactagagtagtatattgtcacatgtctaaacttcaagagagagattatatgattactagacgacagctatgttatcatgaaatgtttgataaaaatatgtataacgtgtcaatggcagtattgggacaacttaatctgatgaataatttagatactttatttcaggaacaggataaggaattgtacccaaatctgaaaataaataatggcgtgttatacggagaagaattggtaacgttaaacattagttccaaatttaaatactttattaatcggatacagacactcaacggaaaacattttatatacttttctaattctacatatggcggattggtaattaaatatatcatgctcagtaatggatattctgaatataatggttctcagggaactaatccacatatgataaacggcaaaccaaaaacatttgctatcgttactagtaaaatgaaatcgtctttagaggatctattagatgtgtataattctcctgaaaacgatgatggtagtcaattgatgtttttgttttcatcaaacattatgtccgaatcctatactctaaaagaggtaaggcatatttggtttatgactatcccagatactttttctcaatacaaccaaattcttggacgatctattagaaaattctcttacgccgatatttctgaaccagttaatgtatatcttttagccgccgtatattccgatttcaatgacgaagtgacgtcattaaacgattacacacaggatgaattaattaatgttttaccatttgacatcaaaaagctgttgtatctaaaatttaagacgaaagaaacgaatagaatatactctattcttcaagagatgtctgaaacgtattctcttccaccacatccatcaattgtaaaagttttattgggagaattggtcagacaatttttttataataattctcgtattaagtataacgataccaagttacttaaaatggttacatcagttataaaaaataaagaagacgctaggaattacatagatgatattgtaaacggtcacttctttgtatcgaataaagtatttgataaatctcttttatacaaatacgaaaacgatattattacagtaccgtttagactttcctacgaaccatttgtttggggagttaactttcgtaaagaatataacgtggtatcttctccataaaactgatgagatatataaagaaataaatgtcgagctttgttaccaatggatacctttccgttacattggaaccacacgagctgacgttagacataaaaactaatattaggaatgccgtatataagacgtatctccatagagaaattagtggtaaaatggccaagaaaatagaaattcgtgaagacgtggaattacctctcggcgaaatagttaataattctgtagttataaacgttccgtgtgtaataacctacgcgtattatcacgttggggatatagtcagaggaacattaaacatcgaagatgaatcaaatgtaactattcaatgtggagatttaatctgtaaactaagtagagattcgggtactgtatcatttagcgattcaaagtactgcttttttcgaaatggtaatgcgtatgacaatggcagcgaagtcactgccgttctaatggaggctcaacaaggtatcgaatctagttttgtttttctcgcgaatatcgtcgactcataaaaaagagaatagcggtaagtataaacacgaatactatggcaataattgcgaatgttttattctcttcgatatatttttgataatatgaaaaacatgtctctctcaaatcggacaaccatctcataaaatagttctcgcgcgctggagaggtagttgccgctcgtataatctctccagaataatatacttgcgtgtcgtcgttcaatttatacggatttctatagttctctgttatataatgcggtttgccctcatgattagacgacgacaatagtgttctaaatttagatagttgatcagaatgaatgtttattggcgttggaaaaattatccatacagcgtctgcagagtggttgatagttgttcctagatatgtaaaataatccaacttactaggcagcaaattgtctagataaaatactgaatcaaacggtgcagacgtattggcggatctaatggaatccaattgattaactatcttttgaaaatatacatttttatgatccaatacttgtaagaatatagaaataatgataagtccatcatcgtgtttttttgcctcttcataagaactatattttttcttattccaatgaacaagattaatctctccagagtatttgtacacatctatcaagtgattggatccataatcgtcttcctttccccaatatatatgtagtgatgataacacatattcattggggagaaaccctccacttatatatcctcctttaaaattaatccttactagttttccagtgttctggatagtggttggtttcgactcattataatgtatgtctaacggcttcaatcgcgcgttagaaattgcttttttagtttctatattaataggagatagttgttgcggcatagtaaaaatgaaatgataactgtttaaaaatagctcttagtatgggaattacaatggatgaggaagtgatatttgaaactcctagagaattaatatctattaaacgaataaaagatattccaagatcaaaagacacgcatgtgtttgctgcgtgtataacaagtgacggatatccgttaataggagctagaagaacttcattcgcgttccaggcgatattatctcaacaaaattcagattctatctttagagtatccactaaactattacggtttatgtactacaatgaactaagagaaatctttagacggttgagaaaaggttctatcaacaatatcgatcctcactttgaagagttaatattattgggtggtaaactagataaaaaggaatctattaaagattgtttaagaagagaattaaaagaggaaagtgatgaacgtataacagtaaaagaatttggaaatgtaattctaaaacttacaacacgggataaattatttaataaagtatatataagttattgcatggcgtgttttattaatcaatcgttggaggatttatcgcatactagtatttacaatgtagaaattagaaagattaaatcattaaatgattgtattaacgacgataaatacgaatatctgtcttatatttataatatgctagttaatagtaaatgaacttttacagatctagtataattagtcagattattaagtataatagacgactagctaagtctattatttgcgaggatgactctcaaattattacactcacggcattcgttaaccaatgcctatggtgtcataaacgagtatccgtgtccgctattttattaactactgataacaaaatattagtatgtaacagacgagatagttttctctattctgaaataattagaactagaaacatgtttagaaagaaacgattatttctgaattattccaattatttgaacaaacaggaaagaagtatactatcgtcatttttttctctagatccagctactactgataatgatagaatagacgctatttatccgggtggcatacccaaaaggggtgagaatgttccagagtgtttatccagggaaattaaagaagaagttaatatagacaattcttttgtattcatagacactcggttttttattcatggcatcatagaagataccattattaataaattttttgaggtaatcttctttgtcggaagaatatctctaacgagtgatcaaatcattgatacatttaaaagtaatcatgaaatcaaggatctaatatttttagatccgaattcaggtaatggactccaatacgaaattgcaaaatatgctctagatactgcaaaacttaaatgttacggccatagaggatgttattatgaatcattaaaaaaattaactgaggatgattgattaaaaaatataaattaatttaccatcgtgtatttttataacgggattgtccggcatatcatgtagatagttaccgtctacatcgtatactcgaccatctacgcctttaaatcctctatttattgacattaatctattagaattggaataccaaatattagtaccctcaattagtttattggtaatattttttttagacgatagatcgatggctcttgaaaccaaggttttccaaccggactcattgtcgatcggtgagaagtctttttcattagcatgaatccattctaatgatgtatgtttaaacactctaaacaattggacaaattcttttgatttgctttgaatgatttcaaataggtcttcgtctacagtaggcataccattagataatctagccattataaagtgcacgtttacatatctacgttctggaggagtaagaacgtgactattgagacgaatggctcttcctactatctgacgaagagacgcctcgttccatgtcatatctaaaatgaagatatcattaattgagaaaaaactaataccctcgcctccactagaagagaatacgcatgttttaatgcattctccgttagtgtttgattcttggttaaactcagccaccgccttgattctagtatcttttgttctagatgagaactctatattagagataccaaagactttgaaatatagtaataagatttctattcctgactgattaacaaatggttcaaagactagacatttaccatgggatgctaatattcccaaacatacatctataaatttgacgcttttctcttttaattcagtaaatagagagatatcagccgcactagcatcccctttcaatagttctccctttttaaaggtatctaatgcggatttagaaaactctctatctcttaatgaatttttaaaatcattatatagtgttgctatctcttgcgcgtattcgcccggatcacgattttgtctttcaggaaagctatcgaacgtaaacgtagtagccatacgtctcagaattctaaatgatgatatacctgtttttatttcagcgagtttagccttttgataaatttcttcttgctttttcgacatattaacgtatcgcattaatactgttttcttagcgaatgatgcagacccttctacgtcatcaaaaatagaaaactcgttattaactatatacgaacatagtcctcctagtttggagactaattctttttcatcgactagacgtttattctcaaatagtgattggtgttgtaaggatcctggtcgtagtaagttaaccaacatggtgaattcttgcacactattgacgataggtgtagccgataaacaaatcatcttatggttttttaacgcaatggtcttagataaaaaattatatactgaacgagtaggacggatcttaccatcttctttgattaatgatttagaaatgaagttatgacattcatcaatgatgacgcatattctactcttggaattaatagttttgatattagtaaaaaatttatttctaaaattttgatcatcgtaattaataaaaatacaatccttcgttatctctggagcgtatctgagtatagtgttcatccaaggatcttctatcaaagcctttttcaccaataagataatagcccaattcgtataaatatccttaagatgtttgagaatatatacagtagtcattgttttaccgacacccgtttcatggaacaataaaagagaatgcatactgtctaatcctaagaaaactcttgctacaaaatgttgataatccttgaggcgtactacgtccgaccccatcatttcaacgggcatattagtagttctgcgtaaggcataatcgatataggccgcgtgtgatttactcatttatgagtgataagtaataactatgttttaaaaatcacagcagtagtttaactagtcttctctgatgtttgttttcgatactttttgaatcagaagtcatactagaataaagcaacgagtgaacgtaatagagagcttcgtatactctattcgaaaactctaagaacttattaatgaattccgtatccactggattgtttaaaatactaaattgaacactgttcacatccttccaagaagaagacttagtgacggacttaacatgagacataaataaatccaaattttttttacaaacatcactagccaccataatggcgctatctttcaaccagctatcgcttacgcattttagcagtctaacatttttaaagagactacaatatattctcatagtatcgattacacctctaccgaataaagttggaagtttaataatacaatatttttcgtttacaaaatcaaataatggtcgaaacacgtcgaaggttaacatcttataatcgctaatgtatagattgttttcagtgagatgattattagatttaatagcatctcgttcacgtttgaacagtttattgcgtgcgctgaggtcggcaactacggcgtccgctttagtactcctcccataatactttacgctattaatctttaaaatttcatagactttatctagatcgctttctggtaacatgatatcatgtgtaaaaagttttaacatgtcggtcggcattctatttagatcattaactctagaaatctgaagaaagtaattagctccgtattccagactaggtaatgggcttttacctagagacagattaagttctggcaatgtttcataaaatggaagaaggacatgcgttccctcccggatattttttacaatttcatccatttacaactctatagtttgttttcattattattagttattatctcccataatcttggtaatacttaccccttgatcgtaagataccttatacaggtcattacatacaactaccaattgtttttgtacataatagattggatggttgacatccatggtggaataaactactcgaacagatagtttatctttccccctagatacattagccgtaatagttgtcggcctaaagaatatctttggtgtaaagttaaaagttagggttcttgttccattattgctttttgtcagtagttcattataaattctcgagatgggtccgttctctgaatatagaacatcatttccaaatctaacttctagtctagaaataatatcggtcttattcttaaaatctattcccttgatgaagggatcgttaatgaacaaatccttggcctttgattcggctgatctattatctccgttatagacgttacgttgactagtccaaagacttacaggaatagatgtatcgatgatgttgatactatgtgatatgtgagcaaagattgttctcttagtggcatcactatatgttccagtaatggcggaaaactttttagaaatgttatatataaaagaattttttcgtgttccaaacattagcagattagtatgaagataaacactcatattatcaggaacattatcaatttttacatacacatcagcatcttgaatagaaacgataccatcttctggaacctctacgatctcggcagactccggataaccagtcggtggaccatcgctaacaataactagatcatccaacaatctactcacatatgcatctatataatctttttcatcttgtgagtaccctggatacgaaataaatttattatccgtatttccataataaggtttagtataaacagagagagatgttgccgcatgaacttcagttacagtcgccgttggttggtttatttgacctattactctcctaggtttctctataaacgatggtttaatttgtacattcttaaccatatatccaataaagctcaattcaggaacataaacaaattctttgttgaacgtttcaaagtcgaacgaagagtcacgaataacgatatcggatactggattgaaggttaccgttacggtaatttttgaatcggatagtttaagactgctgaatgtatcttccacatcaaacggagttttaatataaacgtatactgtagatggttctttaatagtgtcattaggagttaggccaatagaaatatcattaagttcactagaatatccagagtgtttcaaagcaattgtattattgatacaattattatataattcttcgccctcaatttcccaaataacaccgttacacgaagagatagatacgtgattaatacatttatatccaacatatggtacgtaactgaatcttcccatacctttaacttctggaagttccaaactcagaaccaaatgattaagcgcagtaatatactgatccctaatttcgaagctagcgatagcctgattgtctggaccatcgtttgtcataactccggatagagaaatatattgcggcatatataaagttggaatttgactatcgactgcgaagacattagaccgtttaatagagtcatccccaccgatcaaagaattaatgatagtattattcattttctatttaaaatggaaaaagcttacaataaactccgtagagaaatatctataatttgtgagttttccttaaagtaacagcttccgtaaacgccgtctttatctcttagtaggtttattgtatttatgaccttttccttatcttcatagaatactaaaggcaacaaagaaatttttggttcttctctaagagctacgtgagacttaaccatagaagccaacgaatccctacatattttagaacagaaataccctacttcaccacccttgtatgtctcaatactaataggtctaaaaaccaaatcttgattacaaaaccaacacttatcaattacactatttgtcttaatagacacatctgccatagatttataatactttggtagtatacaagcgagtgcttcttctttagcgggcttaaagactgctttaggtgctgaaataaccacatctggaaggcttactcgcttagccatttaattacggaactatttttttatacttctaatgagcaagtagaaaacctctcatctacaaaaacgtactcgtgtccataatcctctaccatagttacacgttttttagatctcatatgtgctaaaaagttttcccatactaattggttactattatttttcgtataatttttaacagtttgaggttttagatttttagttacagaagtgatatcgaatattttatccaaaaagaatgaataattaattgtcttagaaggagtgttttcttggcaaaagaataccaagtgcttaaatatttctactacttcattaatcttttctgtactcagattcagtttctcatcttttacttgattgattatttcaaagactaacttataatcctttttatttattctctcgttagccttaagaaaactagatacaaaatttgcatctacatcatccgtggatatttgatttttttccatgatatccaagagttccgagataatttctccagaacattgatgagacaataatctccgcaatacatttctcaaatgaataagtttattagacacgtggaagtttgactttttttgtacctttgtacatttttgaaataccgactcgcaaaaaatacaatattcatatccttgttcagatactataccgttatgtctacaaccgctacataatcgtagattcatgttaacactctacgtatctcgtcgtccaatattttatataaaaacattttatttctagacgttgccagaaaatcctgtaatatttttagttttttgggctgtgaataaagtatcgccctaatattgttaccgtcttccgccaatatagtagttaaattatccgcacatgcagaagaacaccgcttaggcggattcagtacaatgttatatttttcgtaccaactcatttaaatatcataatctaaaatagttctgtaatatgtctagcgctaatatattgatcataatcctgtgcataaattaagatacaacaatgtctcgaaatcatcgacatggcttcttccatagttagaagatcgtcgtcaaagttagcaacgtgattcatcaacatttgctgttttgaggcagcaaatactgaaccgtcgccattcaaccattcataaaaaccatcgtctgaatccattgataatttcttgtactggtttttgagagctcgcatcaatctagcatttctagctcccggattgaaaacagaaagaggatcgtacatccagggtccattttctgtaaatagaatcgtataatgtcccttcaagaagatatcagacgatccacaatcaaagaattggtctccgagtttgtaacagacagcggactttaacctatacatgataccgtttagcataatttctggtgatacgtcaatcggagtatcatctattagagatctaaagccggtgtaacattctccaccaaacatattcttattctgacgtcgttctacataaaacatcattgctccattaacgataacaggggaatgaacagcactacccatcacattagttcccaatggatcaatgtgtgtaactccagaacatcttccatagcctatgttaggaggagcgaacaccactcttccactattgccatcgaatgccatagaataaatatccttggaattgatagaaatcggactgtcggatgttgtgatcatcttcataggattaacaactatgtatggtgccgcctgaagtttcatatcgtaactgatgccgtttataggtctagccacagaaaccaacgtaggtctaaatccaactatagacaaaatagaagccaatatctgttcctcatctgtcataacttgagagcatccagtatgaataatcttcattagatggggatctaccgcatcatcatcgttacaataaaaaattcccattctaatgttcataattgcttttctaatcatggtatgcatgtttgctctctgaatctctgtggaaattagatctgatacacctgtaatcactatcggattatcctccgtaagacgattaaccaacaacatataattataagactttacttttctaaattcataaagttgctggattaggctataggtgtctccatgtacatacgcgttctcgagcgcaggaagtttaataccgaatagtgccatcagaataggatgaatatagtaattagtttctggttttctataaataaaagacaaatcttgtgaactagacatatcggtaaaatgcatggattggaatcgtgtagtcgacagaagaatatgatgattagatggagagtatattttatctaactctttgagttggtcaccgattctaggactagctcgagaatgaataagtactaaaggatgagtacatttcacagaaacactagcattgttcaatgtgctctttacatgggtaaggagttgaaatagctcgtttctatttgttctgacaatatttagtttattcataatgttaagcatatcctgaatagtaaagttagatgtgtcatacttgttagtagttagatatttagcaattgcattcccatcatttctcaatctcgtactccaatcatgcgtagatgctacttcatctatagaaaccatacaatcctttttgataggctgttgagattgattatttcctgcacgtttaggtttggtacgttgatttctagcccctgcggatataaagtcatcgtctacaatttgggacaatgaattgcatacactacaagacaaagatttatcagaagtgtgaatatgatcttcatctaccaaagaaagagtttgattagtataactagattttagtcctgcgttagatgttaaaaaaacatcgctattgaccacggcttccattatttatattcgtagtttttactcgaaagcgtgattttaatatccaatcttattacttttggaatcgttcaaaacctttgactaattgtagaatttgatctattgccctacgcgtatactcccttgcatcatatacgttcgtcaccagatcgtttgtttcggcctgaagttggtgcatatctctttcaacattcgacatgagatccttaagggccatatcgtctagattttgttgagatgctgctcctggatttggattttgttgtgctgttgtacatactgtaccaccagtaggtgtaggagtacatacagtggccacaataggaggttgaggaggtgtaaccgttggagtagtacaagaaatacttccatccgattgttgtgtacatgtagttgttggtaacgtctgagaaggttgggtagatggcggcgtcgtcgttttttgatctttattaaatttagagataatatcctgaacagcattgctcggcgtcaacgctggaaggagtgaactcgccggcgcatcagtatcttcagacagccaatcaaaaagattagacatatcagatgatgtattagtttgttgtcgtggttttggtgtaggagcagtactactaggtagaagaataggagccggtgtagctgttggaaccggctgtggagttatatgaatagttggttgtagcggttggataggctgtctgctggcggccatcatattatctctagctagttgttctcgcaactgtctttgataatacgactcttgagactttagtcctatttcaatcgcttcatcctttttcgtatccggatccttttcttcagaataatagattgacgactttggtgtagaggattctgccagcctctgtgagaacttgttaaagaagtccatttaaggctttaaaattgaattgcgattataagattaaatggcagacacagacgatattatcgactatgaatccgatgatctcaccgaatacgaggatgatgaagaagaggaagaagatggagagtcactagaaactagtgatatagatcccaaatcttcttataagattgtagaatcagcatccactcatatagaagatgcgcattctaatcttaaacatatagggaatcatatatctgctcttaaacgacgctatactagacgtataagtctatttgaaatagcgggtataatagcagaaagctataacttgcttcaacgaggaagattacctctagtttcagaattttctgacgaaacgatgaagcaaaatatgctacatgtaattatacaagagatagaggagggttcttgtcctatagtcatcgaaaagaacggagaattgttgtcggtaaacgattttgacaaagatggtctaaaattccatctagactatattatcaaaatttggaaacttcaaaaacgatattagaatttatacgaatatcgttctctaaatgtcacaatcaagtctcgcatgttcagcaatttattgtcgtactttatatcgtgttcattaacgatatcttgcaaaatagtaatgattctatcttccttcgatagatattcttcagagattattgtcttatattctttcttgttatccgatatgaatttgataagactttgaacattattgatacccgtctgtttaattttttctacagatattttagttttggcagattctatcgtatctgtcaatagacatccaacatcgacattcgacgtcaattgtctataaatcaacgtataaattttagaaataacattagcgaattgttgtgcgttgatgtcgttattctgaaacagtatgattttaggtagcattttcttaacaaagagaacgtatttattgttactcagttgaacagatgatatatccagattactaacgcatctgattccgtataccaaactttcagaagaaatggtgtacaattgtttgtattcattcaatgtctctttttcagaaattagtttagagtcgaatactgcaataattttcaagagatagttttcatcagataagattttatttagtgtagatatgataaaactattgttttgttggagaacttgatacgccgcgttctctgtagtcgacgctctcaaatgggaaacaatctccattatttttttggaatcggatacaatatcttcggtatcttgacgcagtctagtatacatagagttaagagagattagagtttgtacattaagcaacatgtctctaaatgtggctacaaacttttcctttttcacatcatctagtttattatataccgatttcacaacggcaccagatttaaggaaccagaatgaaaaactctgataactacaatatttcatcatagttacgattttatcatcttctatagttggtgtaatagcgcatacctttttctccaagactggaaccaacgtcataaaaatgtttaaatcaaaatccatatcaacatctgatgcgctaagaccagtctcgcgttcaagattatctttactaatggtgacgaactcatcgtataaaactctaagtttgtccattatttatttacagatttagttgtttaatttatttgtgctcttccagagttgggatagtatttttctaacgtcggtattatattattaggatctacgttcatatgtatcataatattaatcatccacgttttgataaatctatctttagcttctgaaataacgtatttaaacaaaggagaaaaatatttagctacggcatcagacgcaataacattttttgtaaatgtaacgtatttagacgacagatcttcgttaaaaagttttccatctatgtagaatccatcggttgttaacaccattcccgcgtcagattgaataggagtttgaatagtttgttttggaaatagatccttcaataacttatagttgggtgggaaaaaatcgattttatcactagactctttcttttttactatcattacctcatgaactatttcttgaatgagtatatgtattttctttcctatatcggacgcgttcattggaaaatataccatgtcgttaactataagaatatttttatcctcgtttacaaactgaataatatcagatgtagttcgtaaacgaactatatcatcaccagcacaacatctaactatatgatatccactagtttcctttagccgtttattatcttgttccatattagcagtcattccatcatttaagaaggcgtcaaagataatagggagaaatgacattttggattctgttacgactttaccaaaattaaggatatacggacttactatctttttctcaacgtcaatttgatgaacacacgatgaaaatgtgcttctatgagattgatcatgtagaaaacaacaagggatacaatatttccgcatatcatgaaatatattaagaaatcccaccttattatatttccccaaaggatccatgcacgtaaacattatgccgttatcattaataaagacttctttctcatcggatctgtaaaagttgttactgatttttttcattccaggatctagataattaataatgatgggttttctattcttattctttgtattttggcatatcctagaccagtaaacagtttccactttggtaaaatcagcagacttttgaacgctattaaacatggcattaatggcaataactaaaaatgtaaaatatttttctatgttaggaatatggtttttcactttaatagatatatggtttttggccaaaatgatagatatttttttatccgaggatagtaaaatattattagtcgccgtctctataaaaatgaagctagtctcgatatccaattttattctagaattgataggagtcgccaaatgtaccttatacgttatatctcccttgatgcgttccatttgtgtatctatatcggacacaagatctgtaaatagttttacgttattaatcatcacggtatcgccgtcgctagataacgctaatgtaccatccaagtcccaaatggagagatttaactgttcatcgtttagaataaaatgattaccggtcatattaataaagtgttcatcgtatctagataacaacgacttataattaatgtccaagtcttgaactcgctgaatgatcttttttaacccagttagttttagattggtacgaaatatattgttaaactttgattctacagtaatgtccaaatctagttgtggaaatacttccatcaacattgtttcaaacttgataatattattatctacatcttcgtacgatccaaattccggaatagatgtatcgcacgctctggccacccagataaccaaaaagtcacacgctccaggatatacattgtataaaaagctatcgttttttagtagggtttttttctgcgtgtatacgaagggattaaaaatagtattatcaacgtaactatattccaaattattcttatgagaatagataataatatcgtccttaatatctaacaaatttcctaaatatccctttaattgagtcattcgaagcgtcaatagaatatgtctcttaactatttccggctgttgtatatttaaatgacttcgtaaaaaataatatatgggcgacttctcatctatgtaatcatatggagtgagatatagggctcgttctacctcctgccccttacccacctgtaataccaattgcggacttactatatatcgcatatttatatcgtggggtaaagtgaaaatctactaccgatgatgtaagtcttacaatgttcgaaccagtaccagatcttaatttggaggcctccgtagaactaggggaggtaaatatagatcaaacaacacctatgataaaggagaatagcggttttatatcccgcagtagacgtctattcgcccatagatctaaggatgatgagagaaaactagcactacgattctttttacaaagactttattttttagatcatagagagattcattatttgttcagatgcgttgacgctgtaaaagacgtcactattaccaaaaaaaataacattatcgtggcgccttatatagcacttttaactatcgcatcaaaaggatgcaaacttacagaaacaatgattgaagcattctttccagaactatataatgaacatagtaagaaatttaaattcaactctcaagtatccatcatccaagaaaaactcggataccagtttggaaactatcacgtttatgattttgaaccgtattactctacagtagctctggctattcgagatgaacattcatctggcatttttaatatccgtcaagagagttatctggtaagttcattatctgaaataacatatagattttatctaattaatctaaaatctgatcttgttcaatggagtgctagtacgggcgctgtaattaatcaaatggtaaatactgtattgattacagtgtatgaaaagttacaactggtcatagaaaatgattcacaatttacatgttcattggctgtggaatcaaaacttccaataaaattacttaaagatagaaatgaattatttacaaaattcattaacgagttaaaaaagaccagttcattcaagataagcaaacgcgataaggatacgctactaaaatattttacttaggactggagttagaatttatagacgactcatttcgtttatcattgttactattattactattactatcattattagtgttggcattattagtattcttcttgtcatcttgttcagaaatatacagcaatgctatacctaatactaaatacattatcatgctcgcaatggctctaacaacaacgaaccaaaatgaatttggtcgtagcttttgttcacaaaaatacataaagaaatgtctacataaatctatggcgccattggctacttgaaatagcgccagtcctcctacagattttaatatagctgtataacatgacatttattcatcatcaaaagagacagagtcaccatctgtcatatttagattttttttcatgtgttcaaagtatcctctactcatttcattataatagtttatcatacttagaattttaggacggatcaatgagtaagacttgactagatcgtcagtagtaatttgtgcatcgtctattctgcatccgcttcgtcgaataatgtatagcatcgctttgagattctccatagctatcaagtctttatacaatgacatggaaatatctgtgaatactttatacttctccaacatcgatgccttaacatcatcgcctactttagcattgaaaatacgttctattgtgtagatggatgtagcaagatttttaaacaacaatgccatcttacacgatgattgcctcaagtctccaatcgtttgtttagaacgattagctacagagtccaatgcttggctgactagcatattattatctttagaaattgtattcttcaatgaggcgtttatcatatctgtgatttcgttagtcatattacagtctgactgggttgtaatgttatccaacatatcacctatggatacggtacacgtaccagcatttgtaataatcctatctaagatgttgtatggcattgcgcagaaaatatcttctcctgtaatatctccactctcgataaatctactcagattattcttaaatgccttattctctggagaaaagatatcagtgtccatcatttcattaatagtatacgcagaaaagataccacgagtatcaattctatccaagatacttatcggttccgagtcacagataatggtttcctctccttcgggagatcctgcatagaaatatctaggacaatagtttctatactgtctgtaactctgataatctctaaagtcactaactgataccatgaaattgagaagatcaaacgctgaagtaattaatttttctgcctcgtttttactacaactagttttcatcaatgtagtgacgatgtattgtttagttacttttggtctaatactgatgatagagatattattgcttcccataatggatcttctagtagtcaccttaaagcccattgatgcgaatagcagatagataaagtcttggtatgactcctttctaatatagtacggactacctttgtcacccaactttatacccacataagccataacaacctctttaatagccgtttcatgaggtttatcagccatgagcctgagtagttggaagaatctcatgaatcccgtctcagaaagtcctatatgcatgatagatttatctttcctgggaaactctcgtatagtcatagatgaaatactctttaaagtttctgaaataagattagtaacagtcttacctccgactactctaggtaacaaacaaactctaataggtgttttctctgcggagataatatcagaaaggatagagcaataagtagtattattgtgattataaagaccgaatacataacaggtagaatttataaacatcatgtcctgaaggtttttagacttgtattcctcgtaatccataccgtcccaaaacatggatttggtaactttgatagccgtagatctttgttccttcgccaacaggttaaagaaattaataaagaatttgttgtttctatttatgtccacaaattgcacgtttggaagcgccacggttacattcactgcagcattttgaggatcgcgagtatgaagtacgatgttattgtttactggtatatctggaaagaaatctaccagtctaggaataagagattgatatcgcatagaaatagtaaagtttataatctcatcatcgaagagcattttgttaccattgtaataaatatccactctgtcatatgtataaatgaagtactgttcaaacatgatgagatgtttatatgttggcatagtagtgagatcgacgtttggtaatggcaatgtattaagattaactccataatgtctagcagcatctgcgatgttataagcgtcgtcaaagcggggtcgatcttgtattgttatatattgtctaacacctataagattatcaaaatcttgtctgcttaatacaccgttaacaatttttgccttgaattcttttattggtgcattaataacatccttatagaggatgttaaacaaataagtgttatcaaagttaagatctggatatttcttttctgctagaacatccattgagtcggagccatctggtttaatataaccaccgataaatctagctctgtattctgtatccgtcaatctaatattaagaaggtgttgagtgaaaggtggaagatcgtaaaagctgtgagtattaatgataggattagtttccgaactaatgttaattggggtattaataatatctatatttccagcgttaagtgtaacattaaacagttttaattcacgtgacgtggtatcaattaaataattaatgcccaatttggatatagcagcctgaagctcatcttgtttagttacggatcctaatgagttattaagcaatatatcgaacggatgaacgaaggttgttttgagtttgtcgcatactttgtaatctagacatagatgcggaagaacggtagaaactatacgaaataaatattcagagtcctctaattgatcaagagtaactattgacttaataggcatcatttatttagtattaaatgacgaccgtaccagtgacggatatacaaaacgatttaattacagagttttcagaagataattatccatctaacaaaaattatgaaataactcttcgtcaaatgtctattctaactcacgttaacaacgtggtagatagagaacataatgccgccgtagtgtcatctccagaggaaatatcctcacaacttaatgaagatctatttccagatgatgattcaccggccactattatcgaacgagtacaacctcatactactattattgacgatactccacctcctacgtttcgtagagagttattaatatcggaacaacgtcaacaacgagaaaaaagatttaatattacagtatcgaaaaatgctgaagcaataatggaatctagatctatgataacttctatgccaacacaaacaccatccttgggagtagtttatgataaagataaaagaattcagatgttagaggatgaagtggttaatcttagaaatcaacgatctaatacaaaatcatctgataatttagataattttaccaaaatactatttggtaagactccgtacaaatcaacagaagttaataagcgtatagccatcgttaattatgcaaatttgaacgggtcccccttatcagtcgaggacttggatgtttgttcggaggatgaaatagatagaatctataaaacgattaaacaatatcacgaaagtagaaaacgaaaaattatcgtcactaacgtgattattattgtcataaacattatcgagcaggcattgctaaaactcggatttgaagaaatcaaaggactgagtaccgatatcacttcagaaattatcgatgtggagatcggagatgactgcgatgctgtagcatctaaactaggaatcggtaacagtccggttcttaatattgtattgtttatactcaagatattcgttaaacgaattaaaattatttaatttaatacattcccatatccagacaacaatcgtctggattaatctgttcctgtcgtctcataccggacgacatattaatctttttattagtgggcatctttttagatggtttctttttcccagcattaactgagtcgatacctagaagatcgtgattgatctctccgaccattccacgaacttctaattggccgtctctgacggtaccataaactattttaccagcattagtaacagcttggacaatctgaccatccatcgcattgtacgatgtagtagtaactgttgttctacgtctaggagcaccagaagtatttttggagcccttggatgttgatgtagaagaagacgaggattttgattttggtttacatgtaatacattttgaactctttgattttgtatcacatgcgccggcagtcacatctgtttgagaattaagattattgttgcctcctttgacggctgcatctccaccgatttgcgctagtagatttttaagctgtggtgtaatcttattaactgtttcgatataatcatcgtaactgcttctaacggctaaattttttttatccgccatttagaagctaaaaatatttttatttatgcagaagatttaactagattatacaatgaactaatatgatccttttccagattatttacaaacttggtattttttggttctggaggaggcgaatttaaattcggacttggattcggattttgtaagttcttgatcttattatacatcgagtataggatggcgacagtaactgctacacaaataccgatcaaaagaagaataccaatcatttattgacaataacttcactattgatcaagtatgcaatatatcatcttttcactaaataagtagtaataatgattcaacaatgtcgagatatatggacgataataatttagttcatggaaatatcgctatgattggtgtgaatgactccgctaactctgtggggtgcgcagtgctttccccacatagaataaattagcattccgactgtgataataataccaagtataaacgccataatactcaatactttccatgtacgagtgggactggtagacttactaaagtcaataaaggcgaagatacacgaaagaatcaaaagaatgattccagcgattagcacgccggaaaaataatttccaatcataagcatcatgtccatttaactaataaaaattttaaatcgccgaatgaacaaagtggaatataaaccatataaaaacaatagtttgtactgcaaaaataatatctatttttgttttcgaagatatggtaaaattaaatagtagtacacagcatgttataactaacagcagcaacggctcgtaattacttatcatttactagacgaaaaggtggtgggatattttcttgctcaaataatacgaatatatcacccatccattttatgcgatgtttatatactctaatctttaatagatctatagacgacgggtttaccaacaatatagattttatcgattcatctaatttaaacccttccttaaacgtgaatgatctattatctggcataacgatgaccctacctgatgaatcggacaatgtactgggccatgtagaataaattatcaacgaattatcgtctacgaacatttatatcatttgttttaattttaggacgcgaataaatggatataaaatagaaaataacagatattacaaccagtgttatggccgcgcccaaccaggtaggcagttttattttatcttttactacaggttctcctggatgtacgtcaccaacggcggacgtagttctagtacaattagacgtaagttccgcttgggaattttttaacgctaaagagttaacgttaatcgtgcacccaacgtatttacatctagttcgttgaacatcttgattataatataaccattttctatctctagattcgtcagtgcactcatgtaaccaacataccctaggtcctaaatatttatctccggaattagattttggataattcgcgcaccaacaatttctatttcctttatgatcgttacaaaagacgtataatgccgtatccccaaaagtaaaataatcaggacgaataattctaataaactcagaacaatatctcgcatccatatgtttggagcaaatatcggaataagtagacatagccggtttccgttttgcacgtaaccattctaaacaattggggtttccaggatcgtttctacaaaatccagtcatgaaatcgtcacaatgttctgtcttgtaattattattaaatatttttggacagtgtttggtatttgtcttagaacaacattttgccacgctatcactatcgcccaggagataatccttttttataaaatgacatcgttgcccggatgctatataatcagtagcgtgttttaaatccttaatatattcaggagttacctcgttctgataatagattaatgatccaggacgaaatttgaaagaactacatggttctccatgaattaatacatattgtttagcaaattcaggaactataaaactactacaatgatctatcgacataccatctatcaaacaaaacttgggtttaatttctcccggagatgtttcataatagtacgtataactttcttctgcaaacttaacagctctattatattcaggataattaaaacctaattccatatatttgtctcgtatatctgctattcctggtgctattttgattctattaagagtaacagctgcccccattcttaataatcgtcagtatttaaactgttaaatgttggtatatcaacatctaccttatttcccgcagtataaggtttgttgcaggtatactgttcaggaatggttacatttatacttcttctatagtcctgtctttcgatgttcatcacatatgcaaagaacagaataaacaaaataatgtaagaaataatattaaatatctgtgaattcgtaaatacattgattgccataataattacagcagctacaatacacacaatagacattcccacagtgttgccattacctccacgatacatttgagttactaagcaataggtaataactaagctagtaagaggcaatagaaaagatgagataaatatcatcaatatagagattagaggagggctatatagagccaagacgaacaaaatcaaaccgagtaacgttctaacatcattatttttgaagattcccaaataatcattcattcctccataatcgttttgcatcatacctccatctttaggcataaacgattgctgctgttcctctgtaaataaatctttatcaagcactccagcacccgcagagaagtcgtcaagcatattgtaatatcttaaataactcatttatatattaaaaaatgtcactattaaagatggagtataatctttatgccgaactaaaaaaaatgacttgtggtcaacccctaagtctttttaacgaagacggggatttcgtagaagttgaaccgggatcatcctttaagtttctgatacctaagggattttacgcctctccttccgtaaagacgagtctagtattcgagacattaacaacgaccgataataaaatcactagtatcaatccaacaaatgcgccaaagttatatcctcttcaacgcaaagtcgtatctgaagtagtttctaatatgaggaaaatgatcgaatcaaaacgtcctctatacattactcttcacttggcgtgtggatttggtaagactattaccacgtgttatcttatggctacacacggtagaaaaaccgtcatttgcgtacccaataaaatgttaatacatcaatggaagacacaggtagaggcagtcggattggaacataagatatccatagatggagtaagtagtctattaaaggaactaaagactcaaagtccggatgtattaatagtagtcagtagacatctgacaaacgatgccttttgtaaatatatcaataagcattatgatttgttcatcttggatgaatcacatacgtataatctgatgaacaatacagcagttacaagatttttagcgtattatcctccgatgatgtgttattttttaactgctacacctagaccatctaaccgaatttattgtaacagtattattaatattgccaagttatccaatctaaaaaaaactatctatgcagtagatagtttttttgagccatattccacagataatattagacatatggtaaaacgactagatggaccatctaataaatatcatatatataccgagaagttattatctgtagacgagcctagaaatcaacttattcttgataccctggtagaagaattcaagtcaggaactattaatcgcattttagttattactaaactacgtgaacatatggtattattctacaaacgattattagattttttcggaccagaggttgtatttataggagacgcccaaaatagacgtactccagatatggtcaaatcaatcaaggaactaaatagatttatattcgtatccaccttattttattccggtactggtttagatattcctagtttggattcgttgttcatttgctcggcagtaatcaacaatatgcaaatagagcaattactagggagggtatgtcgagaaacagaactattagataggacggtatatgtatttcctaacacatccatcaaagaaataaagtacatgataggaaatttcatgcaacgaattattagtctgtctgtagataaactaggatttaaacaaaaaagttatcggaaacatcaagaatccgatcccacttctgtatgtacaacatcctccagagaagaacgtgtattaaatagaatatttaactcgcaaaatcgttaagaagtttaagcgacgatccgcatgctgcgcaggccagtgtattacccctcatagtattaatataatccaatgatacttttgtgatgtcggaaatcttaaccaatttagactgacaggcagaacacgtcatgcaatcatcatcgtcatcgataactgtagtcttgggcttctttttgcgactcttcattccggaacgcacattggtgctatccatttaggtagtaaaaaataagtcagaatatgccctataacacgatcgtgcaaaacctggtatatcgtctctatctttatcacaatatagtgtatcgacatttttattattattgacctcgtttatcttggaacatggaatgggaacatttttgttatcaacggccatctttgccttaattccagatgttgtaaaattataactaaacagtctatcatcgacacaaatgaaattcttgtttagacgtttgtagtttacgtatgcggctcgttcgcgtctcattttttcagatattgcaggtactataatattaaaaataagaatgaaataacataggattaaaaataaagttatcatgacttctagcgctgatttaactaacttaaaagaattacttagtctgtacaaaagtttgagattttcagattctgcggctatagaaaagtataattctttggtagaatggggaacatctacttactggaaaataggcgtgcaaaaggtagctaatgtcgagacgtcaatatctgattattatgatgaggtaaaaaataaaccgtttaatattgatccgggctattacattttcttaccggtatattttgggagcgtctttatttattcgaagggtaaaaatatggtagaacttggatctggaaactcttttcaaataccagatgatatgcgaagtgcgtgtaacaaagtattagacagcgataacggaatagactttctgagatttgttttgttaaacaatagatggataatggaagatgctatatcaaaatatcagtctccagttaatatatttaaactagctagtgagtacggattaaacatacccaaatatttagaaattgaaatagaggaagacacattatttgacgacgagttatactctattatagaacgctctttcgatgataaatttccaaaaatatccatatcgtatattaagttgggagaacttagacggcaagttgtagactttttcaaattctcattcatgtatattgagtccatcaaggtagatcgtataggagataatatttttattcctagcgttataacaaaatcaggaaaaaagatattagtaaaagatgtagaccatttaatacgatccaaggttagagaacatacatttgtaaaagtaaaaaagaaaaacacattttccattttatacgactatgatggaaacggaacagaaactagaggagaagtaataaaacgaattatagacactataggacgagactattatgttaacggaaagtatttctctaaggttggtagtgcaggcttaaagcaattgactaataaattagatattaatgagtgcgcaactgtcgatgagttagttgatgagattaataaatccggaactgtaaaacgaaaaataaaaaaccaatcagcatttgatttaagcagagaatgtttgggatatccagaagcggattttataacgttagttaataacatgcggttcaaaatagaaaattgtaaggttgtaaatttcaatattgaaaatactaattgtttaaataacccgagtattgaaactatatatggaaactttaaccagttcgtctcaatctttaatgtcgtcaccgatgtcaaaaaaagattattcgagtgaaataatatgcgcctttgatataggtgcaaaaaatcctgccagaactgttttagaagtcaaggataactccgttagggtattggatatatcaaaattagactggagttctgattgggaaaggcgcatagctaaagatttgtcacaatatgaatacactacagttcttctagaacgtcagcctagaaggtcgccgtatgttaaatttatctattttattaaaggctttttatatcatacatcggctgccaaagttatttgcgtctcgcctgtcatgtctggtaattcatatagagatcgaaaaaagagatcggtcgaagcatttcttgattggatggacacattcggattgcgagactccgttccggatagacgcaaattagacgatgtagcggatagtttcaatttggctatgagatacgtattagataaatggaatactaattatacaccttataataggtgtaaatctagaaattacataaaaaaaatgtaataacgttagtaacgccattatggataatctatttacctttctacatgaaatagaagatagatatgccagaactatttttaactttcatctaataagttgcgatgaaataggagatatatatggtcttatgaaagaacgcatttcctcagaggatatgtttgataatatagtgtataataaagatatacatcctgccattaagaaactagtgtattgcgacatccaacttactaaacacattattaatcagaatacgtatccggtatttaacgattcttcacaagtgaaatgttgtcattatttcgacataaactcagataatagcaatattagctctcgtacagtagagatatttgagagggaaaagtcatctcttgtatcatatattaaaactaccaataagaagagaaaggtcaattacggcgaaataaagaaaactgttcatggaggcactaatgcaaattacttttccggtaaaaagtctgacgagtatctgagtactacagttagatccaacattaatcaaccttggatcaaaaccatctctaagaggatgagagttgatatcattaatcactctatagtaacgcgtggaaaaagctctatattacaaactatagaaattatttttactaatagaacatgtgtgaaaatattcaaggattctactatgcacattattctatccaaggacaaggatgaaaaggggtgtatacacatgattgacaaattattctatgtctattataatttatttctgttgttcgaagatatcatccaaaacgagtactttaaagaagtagctaatgttgtaaaccacgtactcacggctacggcattagatgagaaattattcctaattaagaaaatggctgaacacgatgtttatggagttagcaatttcaaaatagggatgtttaacctgacatttattaagtcgttggatcataccgttttcccctctctgttagatgaggatagcaaaataaagttttttaaggggaaaaagctcaatattgtagcattacgatctctggaggattgtataaattacgtgactaaatccgagaatatgatagaaatgatgaaggaaagatcgactattttaaatagcatagatatagaaacggaatcggtagatcgtctaaaagaattgcttctaaaatgaaaaaaaacactaattcagaaatggatcaacgactagggtataagtttttggtgcctgatcctaaagccggagttttttatagaccgttacatttccaatatgtatcgtattctaattttatattgcatcgattgcatgaaatcttgaccgtcaagcggccactcttatcgtttaagaataatacagaacgaattatgatagaaattagcaatgttaaagtgactcctccagattactcacctataatcgcgagtattaaaggtaagagttatgacgcattagccacgttcactgtaaatatctttaaagaggtaatgaccaaagagggtatatccatcactaaaataagtagttatgagggaaaagattctcatttgataaaaattccgctactaataggatacgggaataaaaatccacttgatacagccaagtatcttgttcctaatgtcataggtggagtctttatcaataaacaatctgtcgaaaaagtaggaattaatctagtagaaaagattacaacatggccaaaatttagggttgttaagccaaactcattcactttctcgttttcctccgtatcccctcctaatgtattaccgacaagatatcgccattacaagatatctctggatatatcacaattggaagcgttgaatatatcatcgacaaagacatttataacggtcaatattgttttgctgtctcaatatttatctagagtgagtctagaattcattagacgtagtttatcatacgatatgcctccagaagttgtctatctagtaaacgcgataatagatagtgctaaacgaattactgaatctattactgactttaatattgatacatacattaatgacctggtggaagctgaacacattaaacaaaaatctcagttaacgattaacgagttcaaatatgaaatgctgcataactttttacctcatatgaactatacacccgatcaactaaagggattttatatgatatctttactaagaaagtttctctactgtatcttccacacttctagatatccagatagagattcgatggtttgtcatcgcatcctaacgtacggcaaatattttgagacgttggcacatgatgaattagagaattacataggcaacatccgaaacgatatcatgaacaatcacaagaacagaggcacttacgcggtaaacattcatgtactaacaactcccggacttaatcacgcgttttctagcttattgagtggaaagttcaaaaagtcagacggtagttatcgaacacatcctcactattcatggatgcagaatatttctattcctaggagtgttggattttatccggatcaagtaaagatttcaaagatgttttctgtcagaaaataccatccaagtcaatatctttacttttgttcatcagacgttccggaaagaggtcctcaggtaggtttagtatctcaattgtctgtcttgagttccattacaaatatactaacgtctgagtatttggatttggaaaagaaaatttgtgagtatatcagatcatattataaagatgatataagttactttgaaacaggatttccaatcactatagaaaatgctctagtcgcatctcttaatccaaatatgatatgtgattttgtaactgactttagacgtagaaaacggatgggattcttcggtaacttggaggtaggtattactttagttagggatcacatgaatgaaattcgcattaatattggagcgggaagattagtcagaccattcttggttgtggataacggagagctcatgatggatgtgtgtccggagttagaaagcagattagacgacatgacattctctgacattcagaaagagtttccgcatgtcatcgaaatggtagatatagaacaatttacttttagtaacgtatgtgaatcggttcaaaaatttagaatgatgtcaaaggatgaaagaaagcaatacgatttatgtgactttcctgccgaatttagagatggatatgtagcatcttcactagtgggaatcaatcacaattctggacccagagctattcttggatgtgctcaagctaaacaagctatctcttgtctgagttcggatatacgaaataaaatagacaatggaattcatttgatgtatccagagaggccaatcgtgattagtaaggctttagaaacttcaaagattgcggctaattgcttcggccaacatgttactatagcattaatgtcgtacaaaggtatcaatcaagaggatggaattatcatcaaaaaacaatttattcagagaggcggtctcgatattgttacagccaagaaacatcaagtagaaattccattggaaaactttaataacaaagaaagagataggtctaacgcctattcaaaattagaaagtaatggattagttagactgaatgctttcttggaatccggagacgctatggcacgaaatatctcatcaagaactcttgaagatgattttgctagagataatcagattagcttcgatgtttccgagaaatataccgatatgtacaaatctcgcgttgaacgagtacaagtagaacttactgacaaagttaaggtacgagtattaaccatgaaagaaagaagacccattctaggagacaaatttaccactagaacgagtcaaaagggaacagtcgcgtatgtcgcggatgaaacggaacttccatacgacgaaaatggtatcacaccagatgtcattattaattctacatccatcttctctagaaaaactatatctatgttgatagaagttattttaacagccgcatattctgctaagccgtacaacaataagggagaaaaccgacctgtctgttttcctagtagtaacgaaacatccatcgatacatatatgcaattcgctaaacaatgttatgagcattcaaatccgaaattgtccgatgaagaattatcggataaaatcttttgtgaaaagattctctatgatcctgaaacggataagccttatgcatccaaagtattttttggaccaatttattacttgcgtctgaggcatttaactcaggacaaggcaaccgttagatgtagaggtaaaaagacgaagctcattagacaggcgaatgagggacgaaaacgtggaggaggtatcaagttcggagaaatggagagagactgtttaatagcgcatggtgcagccaatactattacagaagttttgaaagattcggaagaagattatcaagatgtgtatgtttgtgaaaattgtggagacatagcagcacaaatcaagggtattaatacatgtcttagatgttcaaaacttaatctctctcctctcttaacaaaaattgataccacgcacgtatctaaagtatttcttactcaaatgaacgccagaggcgtaaaagtcaaattagatttcgaacgaaggcctccttcgttttataaaccattagataaagttgatctcaagccgtcttttctggtgtaatattctagtttggtagtagatacatatcaatatcatcaaattcgagatccgaattataaaatgggcgtggattgttaactatagaatcggacgtctgatattcgaaaatctgtggagtttcaggttttggtggaggtgtaactgctacttgggatactgaagtctgatattcagaaagctgtggatgttctggttcggcatccaccgatggtgtcacatcactaatcggttcggtaacgtctgtggatggaggtgctacttctacagaacctgtagcctcagttgtcaacggagatacatttttaatgcgagaaaatgtataatttggtaatggtttcttatgtggatctgaagaagaggtaagatatctactagaaagataccgatcacgttctagttctcttttgtagaacttaactttttctttctccgcatctagttgatattccaacctcttcacgttactacgttcagattccaattcacgttcgcatgggttacctccgcagtttttacgagcgatttcacgttcagccttcatgcgtctctccctctctctatcgagtttatcagagcagtctttctgaaggcgatcgaactccataaatttctccaacgctttgattgtttccatagatttccgaagttcagcttttaggactgtgattctttttctttcgaattcacagctggatgtacaaccgtttccattaccgccatctctaagtttcttttctagatcggcaacatttcatccccatgccttttacattcctcgagtctactgtcgtcgaaatatcgttccagctccttttcgacatcaataactttagcacgttgtctctcaagctctcttttgtagttatctgattccctggcacgtttaagatcttcatgcaattgagtcagctcttaacttcctctcttgcttcttcgtcatagtacgcgcaatcactgtgagatccattgttaccacgtctacactcggcgagctcgcgtttaagagattcaatttcccgtttgtattggtccatgtttccattgctaccaccattagatttacaggctgctagttgtcgttcgagatcagaaatacgggttttcttggaattgatttcgtcgatgtacttggcatcgaaacacttattaagttctttttccaattctacgattttatttctttcgcgagtcaattccctcctgtagtaactatctgttttgtcagattcacgctctctacgtagactttcttgcaagttactaatttgttccctagcacgtccgagtttagttttatatgctgaatagagttctgattcatcctttgagcagatctctagcgatcgtttaagattcctaattctagtctttagcctatttacctcctcagaagatgttccgttaccgttgcgtttacactcgttaagctgtctatcaagatccatgattctatctctaagacgttgcatctctctttccatatcagcattgctttcattattacgtctgcagtcactcaactgtctttcaatatctgagattctatctctaagacgtcgcatctctctctgtttcggcattggtttcattattacgtttacagtcgttcaactgtctttcaagatctgatattctagattggagtctgctaatctctgtagcattttcacggcattcactcagttgtctttcaagatctgaaattttagattggagtctgctaatctctgtaagatttcctcctccgctctcgatgcagtcggtcaacttattctctagttctctaatacgcgaacgcagtgcatcaacttcttgcgtgtcttcctggttgcgtgtacattcatcgagtctagattcgagatctctaacgcgtcgtcgttcttcctcaagttctctgcgtactacagaaagcgtgtccttatcttgttgatatttagcaatttctgattctagagtactgattttgcttacgtagttactaatatttgtcttggccttatcaagatcctccttgtatttgtcgcattccttgatatccctacgaagtctggacagttcccattcgacattacgacgtttatcgatttcagctcggagatcgtcatcgcgttgttttagccacatacgactgagttcaagttctcgttgacaagatccatctacttttccattcctaatagtatccagttccttttctagttctgaacgcatttctcgttccctatcaagcgattctctcaattctcggatagtcttcttatcaatttctaataaatctgaaccatcatctgtcccattttgaatatccctgtgttctttgatctcttttgtaagtcggtcgattctttcggttttataaacagaatccctttccaaagtcctaatcttactgagtttatcactaagttctgcattcaattcggtgagttttctcttggcttcttccaactctgttttaaactctccactatttccgcattcttcctcgcatttatctaaccattcaattagtttattaataactagttggtaatcagcgattcctatagccgttcttgtaattgtgggaacataattaggatcttctaatggattgtatggcttgatagcatcatctttatcattattagggggatggacaaccttaattggttggtcctcatctcctccagtagcgtgtggttcttcaataccagtgttagtaataggcttaggcaaatgcttgtcgtacgcgggcacttcctcatccatcaagtatttataatcgggttctacttcagaatattcttttctaagagacgcgacttcgggagttagtagaagaactctgtttctgtatctatcaacgctggaatcaatactcaagttaaggatagcgaatacctcatcgtcatcatccgtatcttctgaaacaccatcatatgacatttcatgaagtctaacgtattgataaatagaatcagatttagtattaaacagatccttaacctttttagtaaacgcatatgtatattttagatctccagatttcataatatgatcacatgccttaaatgtcagtgcttccatgatataatctggaacactaatgggtgacgaaaaagatacagcaccatatgctacgttgataaataaatctgaaccactaagtagataatgattaatgttaagaaagaggaaatattcagtgtataggtatgtcttggcgtcatatcttgtactaaacacgctaaacagtttgttaatgtgatcaatttccaatagattaattagagcagcgggaataccaacaaacatattaccacatccgtattttctatgaatatcacatatcatgttaaaaaatcttgatagaagagcgaatatctcgtctgacttaatgagtcgtagttcagcagcaacataagtcataactgtaaatagaacatactttcctgtagtgttgattctagactccacatcaacaccattattaaaaatagttttatatacatctttaatctgctctccgttaatcgtcgaacgttctagtatacggaaacactttgatttcttatctgtagttaatgacttagtgatatcacgaagaatattacgaattacatttcttgtttttcttgagagacctgattcagaactcaactcatcgttccatagtttttctacctcagtggcgaaatctttggagtgcttggtacatttttcaataaggttcgtgacctccatttattataaaaaatttattcaaaacttaactacaatcgggtaattataaaatcgtagatctcccatgtggcggaatactaccatctatcgcatgtggatggacagtaggtaatggccatgggaacagtaatgtttgcatatttatctttcttgccagtattactgcatattgtcccaatgtttcgatgtgatgttctaacctatcaactgccgctgtatcacaacaatagtgtccgatgaaattaagattatgatccaatgtgtttaatatatgattatcaagtcttatacgatccgcgtcttttttgacaggatcaggttcttctacaggaagaagtttcggcctcttatgatattcatgtctgggaaacggtggtctagggtgaggctccggtatcggagtgggttttggattataatcatcatcgtctatgacatcatcatcatcttcgacttcgatatttattttgctatcttgatgatgtcctgtatcagttgcattttcagcactcgactgaatattagcgcattcattgtctattattaccatatttctaaacccaaaatgtatgtgttgaacatcagtactatcgttgatgagtcttatagcatgaattcgcttatcgttatcgggtttatcttctgtcaccttagcaattccttttttattaaactctacataatcatatccatttctattgtttgttctaatataaacgagtatagcatcattgctaaatttttcaatagtatcaaaaacagaatatcctaaaccatataatatatattcaggaacactcaaactaaatgtccaggattctcctaaatacgtaaactttaatagtgcgaaatcattcaaaaatctaccacttatagatagatagtacataaatgcgtatagtagtctacctatctctttattatgaaaaccggcattacgatcatatatgtcgtgatatacctgtgatccgtttacgttaaaccataaatacatgggtgatcctataaacatgaatttatttctaattctcagagctatagttaattgaccgtgtaatatttgcttacatgcatacttgatacgcttattaataagatttttatcattgctcgttatttcagaatcgtatatataaggagtaccatcgtgattcttaccagatattatacaaaatactatatataaaatatattgacccacgttagtaatcatataaatgtttaacgttttaaattttgtattcaatgatccattatcatacgctatcatggtcttgtaatattcattctttaaaatataatattgtgttagccattgcattggagctcctaatggagattttctattctcatccattttaggataggctttcataaagtccctaataacttcgtgaataatgtttctatgttttctactgatgcatgtatttgcttcgatttttttatcccatgtttcatctatcatagatttaaacgcagtaatgctcgcaacattaacatcttgaaccgttggtacaattccgttccataaatttataatgttcgccatttatataactcattttttgaatatacttttaattaacaaaagagttaagttactcatatggacgccgtccagtctgaacatcaatctttttagccagagatatcatagccgctcttagagtttcagcgtgattttccaacctaaatagaacttcatcgttgcgtttacaacacttttctatttgttcaaactttgttgttacattagtaatctttttttccaaattagttagccgttgtttgagagtttcctcattgtcgtcttcatcggctttaacaattgcttcgcgtttagcctctggctttttagcagcctttgtagaaaaaaattcagttgctggaattgcaagatcgtcatctccggggaaaagagttccgtccatttaaagtacagattttagaaactgacactctgcgttatttatatttggtacaacacatggattataaatattgatgttaataacatcagaaaatgtaaagtctatacattgttgcatcgtgttaaattttctaatggatctagtattattgggtccaacttctgcctgaaatccaaatatggaagcggatacaaaaccgtttcctggataaaccacacatctccacttttgctttacatcagaaattgtgtcgttgacatcttgaactctcctatctaatgccggtgttccacctatagattttgaatattcgaatgctgcatgagtagcattaaattccttaatattgccataattttcatatattgagtaaccctggataaaaagtaaacacaccgcagccgtcgctaccacaataaaaaaaattgatagagagttcatttataatctattagaagctgacaaaatttttttacacgcatcagacaatgctttaataaatagttcaacatctacttttgtcatatcgaaccgatggtatgattctaacctagaattacatccgaaaaagttgactatgttcatagtcattaagtcattaacaaacaacattccagactctggattataagacgatactgtttcgtcacaattacctaccttaatcatgtgattatgaatattggctattagagcaccttctaagaaatctataatatctttgaaacacgatttaaaatcaaaccacgaatatacttctacgaagaaagttagtttacccataggagaaataactataaatggagatctaaatacaaaatccggatctatgatagttttaacattattatattctctattaaatacctccacatctaaaaatgttaattttgaaactatgtcttcgtttattaccgtacctgaactaaacgctataagctctattgtttgagaactctttaaacgatattcttgaaatacatgtaacaaagtttcctttaactcggtcggtttatctaccatagttacagaatttgtatccttatctataatataataatcaaaatcgtataaagttatataattatcgcgttcagattgggatcttttcaaatagactaaaaaccccatttctctagtaagtatcttatgtatatgtttgtaaaatatcttcatggtgggaatatgctctaccgcagttagccattcctcattgacagcggtagatgtattagacaaaactattccaatgtttaacaagggccattttacgagattattaaatccttgtttgataaatgtagccaatgagggttcgagttcaacgacgattgaattctcttcccgcggatgctgcatgatgaacgacgggatgttgttcgattgatttggaattctttttcgactttttgtttatattaaatattttaaaatttatagcggatagcaattcatgtaccacggataatgtagacgcgtattgcgcatcgatatctttattattagataaatttatcaataaatgtgagaagtttgcctcgttaaggtcttccatttaaatattatataaacatttgtgtttgtatcttattcgtcttttatggaatagttttttactagtaaagctgcaattacacactttgtccgtaaaacataaatataaacaccagcttttatcaatcgttccaaaaagtcgacggcggacatttttaacatggcatctattttaaatacacttaggtttttggaaaaaacatcattttataattgtaacgattcaataactaaagaaaagattaagattaaacataagggaatgtcatttgtattttataagccaaagcattctaccgttgttaaatacttgtctggaggaggtatatatcatgatgatttggttgtattggggaaggtaacaattaataatctaaagatgatgctattttacatggatttatcatatcatggagtgacaagtagtggagcaatttacaaattgggatcgtctatcgatagactttctctaaataggactattgttacaaaagttaataattatgatgatacattttttgacgacgatgattgatcgctattgcacaattttgtttttgtactttctaatatagtgtttaggttctttttcatatgagaatattgatttactaaaatatctatgtttaacttttgttctatgacgtccttatcggcggtatcggtacatatacgtaattcaccttcacaaaatacggagtcttcgataataatagccaatcgattattggatctagctgtctgtatcatattcaacatgtttaatatatcctttcgtttcccctttacaggcatcgatcgtagcatattttccgcgtctgatatggaaatgttaaaactacaaaaatgcgtaatgttagcccgtcctaatattggtacgtgtctataagtttggcatagtagaataatagacgtgtttaaatgccttccaaagtttaagaattctattagagtattgcattttgatagtttatcgcctacatcatcaaaaataagtaaaaagtgtgctgattttttatgattttgtgcgacagcaatacatttttctatgttacttttagttcgtatcagattatattctagagattcctgactactaacgaaattaatatgatttggccaaatgtatccatcataatctgggttataaacgggtgtaaacaagaatatatgtttatattttttaactagtgtagaaaacagagatagtaaatagatagtttttccagatccagatcctcctgttaaaaccattctaaacggcatttttaataaattttctcttgaaaattgtttttcttggaaacaattcataattatatttacagttactaaattaatttgataataaatcaaaatatggaaaactaaggttgttagtagggaggagaacaaagaaggcacatcgtgatataaataacatttattatcatgatgacaccagaaaacgacgaagagcagacatctgtgttctccgctactgtttacggagacaaaattcagggaaagaataaacgcaaacgcgtgattggtctatgtattagaatatctatggttatttcactactatctatgattaccatgtccgcgtttctcatagtgcgcctaaatcaatgcatgtctgctaacgaggctgctattactgacgccgctgttgccgttgctgctgcatcatctactcatagaaaggttgcgtctagcactacacaatatgatcacaaagaaagctgtaatggtttatattaccagggttcttgttatatattacattcagactaccagttattctcggatgctaaagcaaattgcactgcggaatcatcaacactacccaataaatccgatgtcttgactacctggctcattgattatgttgaggatacatggggatctgatggtaatccaattacaaaaactacatccgattatcaagattctgatgtatcacaagaagttagaaagtatttttgtgttaaaacaatgaactaatatttatttttgtacattaataaatgaaatcgcttaatagacaaactgtaagtaggtttaagaagttgtcggtgccggccgctataatgatgatactctcaaccattattagtggcataggaacatttctgcattacaaagaagaactgatgcctagtgcttgcgccaatggatggatacaatacgataaacattgttatttagatactaacattaaaatgtctacagataatgcggtttatcagtgtcgtaaattacgagctagattgcctagacctgatactagacatctgagagtattgtttagtattttttataaagattattgggtaagtttaaaaaagaccaatgataaatggttagatattaataatgataaagatatagatattagtaaattaacaaattttaaacaactaaacagtacgacggatgctgaagcgtgttatatatacaagtctggaaaactggttaaaacagtatgtaaaagtactcaatctgtactatgtgttaaaaaattctacaagtgacaacaaaaaatgaattaataataagtcgttaacgtacgccgccatggacgccgcgtttgttattactccaatgggtgtgttgactataacagatacattgtatgatgatctcgatatctcaatcatggactttataggaccatacattataggtaacataaaaactgtccaaatagatgtacgggatataaaatattccgacatgcaaaaatgctactttagctataagggtaaaatagttcctcaggattctaatgatttggctagattcaacatttatagcatttgtgccgcatacagatcaaaaaataccatcatcatagcatgcgactatgatatcatgttagatatagaagataaacatcagccattttatctattcccatctattgatgtttttaacgctacaatcatagaagcgtataacctgtatacagctggagattatcatctaatcatcaatccttcagataatctgaaaatgaaattgtcgtttaattcttcattctgcatatcagacggcaatggatggatcataattgatgggaaatgcaatagtaattttttatcataaaagttgtaaagtaaataataaaacaataaatattgaactagtagtacgtatattgagcaatcagaaatgatgctggtacctcttatcacggtgaccgtagttgcgggaacaatattagtatgttatatattatatatttgtaggaaaaagatacgtactgtctataatgacaataaaattatcatgacaaaattaaaaaagataaagagttctaattccagcaaatctagtaaatcaactgatagcgaatcagactgggaggatcactgtagtgctatggaacaaaacaatgacgtagataatatttctaggaatgagatattggacgatgatagcttcgctggtagtttaatatgggataacgaatccaatgttatggcgcctagcacagaacacatttacgatagtgttgctggaagcacgctgctaataaataatgatcgtaatgaacagactatttatcagaacactacagtagtaattaatgaaacggagactgttgaagtacttaatgaagataccaaacagaatcctaactattcatccaatcctttcgtaaattataataaaaccagtatttgtagcaagtcaaatccgtttattacagaacttaacaataaatttagtgagaataatccgtttagacgagcacatagcgatgattatcttaataagcaagaacaagatcatgaacacgatgatatagaatcatcggtcgtatcattggtgtgattagtttcctttttataaaattgaagtaatatttagtattattgctgccgtcacgttgtacaaatggagatattccctgtattcggcatttctaaaattagcaattttattgctaataatgactgtagatattatatagatacagaacatcaaaaaattatatctgatgagatcaatagacagatggatgaaacggtacttcttaccaacatcttaagcgtagaagttgtaaatgacaatgagatgtaccatcttattcctcatagattatcgacgattatactctgtattagttctgtcggaggatgtgttatctctatagataatgacatcaatggcaaaaatattctaacctttcccattgatcatgctgtaatcatatccccactgagtaaatgtgtcgtagttagcaagggtcctacaaccatattggttgttaaagcggatatacctagcaaacgattggtaacatcgtttacaaacgacatactatatgtaaacaatctgtcactgattaattatttgccgttgtctgtattcattattagacgagtcaccgactatttggatagacacatatgcgatcagatatttgctaataataagtggtattcccttataaccatcgacgataagcaatatcctattccatcaaactgtataggtatgtcctctgccaagtacataaattctagcatcgagcaagatactttaatccatgtttgtaacctcgagcatccgttcgactcagtatacaaaaaaatgcagtcgtacaattctctacctatcaaggaacaaatattgtacggtagaattgataatataaatatgagcattagtatttctgtggattaatagatttctagtatggggatcattaatcatctctaatctctaaatacctcataaaacgaaaaaaaagctattatcaaatactgtacggaatggattcattctcttctctttttatgaaactctgttgtatatctactgataaaactggaagcaaaaaatctgatagaaagaataagaataagatcaaggattatatggaacacgattattataaaataacaatagttcctggttcctcttccacgtctactagctcgtggtattatacacatgcctagtaatagtctctttgcgttgacggaaagcagactagaaataacaggctaaaatgttcagacaccataatagttcccaacccagataataacagagttccatcaacacattcctttaaactcaatcccaaacccaaaaccgttaaaatgtatccggccaattgatagtagataatgaggtgtacagcgcatgataatttacacagtaaccaaaatgaaaatactttagtaattataagaaatatagacggtaatgtcatcatcaacaatccgataatatgcctgagagtaaacattgacggataaaacaaaaatgctccgcataactctatcatggcaataacacaaccaaatacttgtaagattcctaaattagtagaaaatacaacgaatatcgatgtataagtgatctcgagaaataataagaataaagtaatgcccgtaaagataaacatcaacattgtttggtaatcattaaaccaattagtatgaagttgaactaatttcacagtagattttattccagtgttatcctcgcatgtataagtacctggtaagatatctttatattccataatcaatgagacatcactatctgataacgaatgaagtctagcactagtatgccatttacttaatattgtcgtcttggaagttttattataagttaaaatatcatggttatccaatttccatctaatatactttgtcggattatctatagtacacggaataatgatggtatcattacatgctgtatactctatggtctttgtagttgttataacaaccaacgtatagaggtatatcaacgatattctaactcttgacattttttatttatttaaaatgatacctttgttatttattttattctattttgctaacggtattgaatggcataagtttgaaacgagtgaagaaataatttctacttacttattagacgacgtattatacacgggtgttaatggggcggtatacacattttcaaataataaactaaacaaaactggtttaactaataataattatataacaacatctataaaagtagaggatgcggataaggatacattagtatgcggaaccaataacggaaatcccaaatgttggaaaatagacggttcagacgacccaaaacatagaggtagaggatacgctccttatcaaaatagcaaagtaacgataatcagtcacaacggatgtgtactatctgacataaacatatcaaaagaaggaattaaacgatggagaagatttgacggaccatgtggttatgatttatacacggcggataacgtaattccaaaagatggtttacgaggagcattcgtcgataaagatggtacttatgacaaagtttacattcttttcactgatactatcggctcaaagagaattgtcaaaattccgtatatagcacaaatgtgcctaaacgacgaaggtggtccatcatcattgtctagtcatagatggtcgacgtttctcaaagtcgaattagaatgtgatatcgacggaagaagttatagacaaattattcattctagaactataaaaacagataatgatacgatactatatgtattcttcgatagtccttattccaagtccgcattatgtacctattctatgaataccattaaacaatctttttctacgtcaaaattggaaggatatacaaagcaattgccgtctccagctcctggtatatgtttaccagctggaaaagttgttccacataccacgtttgaagtcatagaaaaatataatgtactagatgatattataaagcctttatctaaccaacctatcttcgaaggaccgtctggtgttaaatggttcgatataaaggagaaggaaaatgaacatcgggaatatagaatatacttcataaaagaaaattctatatattcgttcgatacaaaatctaaacaaactcgtagctcgcaagtcgatgcgcgactattttcagtaatggtaacttcgaaaccgttatttatagcagatatagggataggagtaggaatgccacaaatgaaaaaaatacttaaaatgtaatcttaattcgagtacaccacacgacaatgaacaaacataagacagattatgctggttatgcttgctgcgtaatatgcggtctaattgtcggaattatttttacagcgacactattaaaagttgtagaacgtaaattagttcatacaccatcaatagataaaacgataaaagatgcatatattagagaagattgtcctactgactggataagctataataataaatgtatccatttatctactgatcgaaaaacctgggaggaaggacgtaatgcatgcaaagctctaaattcaaattcggatctaattaagatagagactccaaacgagttaagttttttaagaagccttagacgaggctattgggtaggagaatccgaaatattaaaccagacaaccccatataattttatagctaagaatgccacgaagaatggaactaaaaaacggaaatatatttgtagcacaacgaatactcccaaactgcattcgtgttacactatataacaattacactacatttttatcataccactacttcggttagatgttttagaaaaaaataaatatcgccgtaccgttcttgtttttataaaaataacaattaacaattatcaaattttttctttaatattttacgtggttgaccattcttggtggtaaaataatctcttagtgttggaatggaatgctgtttaatgtttccacactcatcgtatattttgacgtatgtagtcacatcgtttacgcaatagtcagactgtagttctatcatgcttcctacatcagaaggaggaacagttttaaagtctcttggttttaatctattaccgttagttttcatgaaatcctttgttttatccacttcacattttaaataaatgtccactatacattcttttgttaattttactagatcgtcatgggtcatagaatttataggttccgtagtccatggatccaaactagcaaacttcgcgtatacggtatcgcgattagtgtatacaccaactgtatgaaaattaagaaaacagtttaataaatcaacagaaatatttaatcctccgtttgatacagatgcgccatatttatggatttcggattcacacgttgtttgtctgaggtgttcgtctagtgttgcttctacgtaaacttcgattcccatatattctttattgtcagaatcgcataccgatttatcatcatacactgtttgaaaactaaatggtatacacatcaaaataataaataataacgagtacattctgcaatattgttatcgtaattggaaaaatagtgttcgagtgagttggattatgtgagtattggattgtatattttattttatattttgtaataagaataaaatgctaatgtcaagtttattccaatagatgtcttattaaaaacatatataataaataacaatggctgaatggcataaaattatcgaggatatctcaaaaaataataagttcgaggatgccgccatcgttgattacaagactacaaagaatgttctagctgctattcctaacagaacatttgccaagattaatccgggtgaaattattcctctcatcactaatcgtaatattctaaaacctcttattggtcagaaatattgtattgtatatactaactctctaatggatgagaacacgtatgctatggagttgcttactgggtacgcccctgtatctccgatcgttatagcgagaactcataccgcacttatatttttgatgggtaagccaacaacatccagacgtgacgtgtatagaacgtgtagagatcacgctacccgtgtacgtgcaactggtaattaaaataaaaagtaatattcatatgtagtgtcaattttaaatgatgatgatgaaatggataatatccatattgacgatgtcaataatgccggtattggcatacagttcatcgatttttagatttcattcagaggatgtggaattatgttatgggcatttgtattttgataggatctataatgtagtaaatataaaatataatccgcatattccatatagatataattttattaatcgcacgttaaccgtagatgaactagacgataatgtcttttttacacatggttattttttaaaacacaaatatggttcacttaatcctagtttgattgtctcattatcaggaaacttaaaatataatgatatacaatgctcagtaaatgtatcgtgtctcattaaaaatttggcaacgagtacatctactatattaacatctaaacataagacttattctctacatcggtccacgtgtattactataataggatacgattctattatatggtataaagatataaatgacaagtataatgacatctatgattttactgcaatatgtatgctaatagcgtctacattgatagtgaccatatacgtgtttaaaaaaataaaaatgaactcttaattatgctatgctattagaaatggataaaatcaaaattacggttgattcaaaaattggtaatgttgttaccatatcgtataacttggaaaagataactattgatgtcacacctaaaaagaaaaaagaaaaggatgtattattagcgcaatcagttgctgtcgaagaggcaaaagatgtcaaggtagaagaaaaaaatattatcgatattgaagatgacgatgatatggatgtagaaagcgcgtaatactatctataaaaataagtatataataaatactttttatttacggtactcttactgtgtagtggtgataccctactcgattatttttttaaaaaaatacttattctgattcttctaaccatttccgtgttcgttcgaatgccacatcgacgtcaaagataggggagtagttgaaatctagttctgcattgttggtacgcacctcaaatgtagtgttggatatcttcaacgtatagttgttgagtagtgatggttttctaaatagaattctcttcatatcattcttgcacgcgtacatttttagcatccatcttggaatcctagatccttgttctattcccaatggtttcatcaatagaagattaaacatatcgtacgaacacgatggagagtaatcgtagcaaaagtaagcatttcctttaatcttagatcccggatactggatatattttgcagccaacacgtgcatccatgcagcatttcctacatatacccggctatgcaccgcgtcatcatcgactgtacgatacataatgttaccgtgttgcttacattgctcgtaaaagactttcgtcaatttgtctccttctccgtaaattctagtgggtcttaggcaacaagtatacaattttgctccattcatgattacggaattattggctttcataaccagttgctcggccatacgtttactttttgcgtatacatgtcctggtgatatatcataaagggtatgctcatggccgatgaatggatcaccgtgtttattgggtcctattgcttccatgctactagtatagatcaaatacttgattcctaggtccacacaagctgccaaaatagtctgtgttccataatagtttactttcatgatttcattatcggtgtattttccaaatacatccactagagcagccgtatgaataatcagatttaccccatctagcgcttctctcaccttatcaaagtcgtttatatcacattgtatatagtttataaccttaactttcgaggttattggttgtggatcttctacaatatctatgactctgatttcttgaacatcatctgcactaattaacagttttactatatacctgcctagaaatccggcaccaccagtaaccgcgtacacggccattgctgccactcataatatcagactacttattctattttactaaataatggctgtttgtataatagaccacgataatatcagaggagttatttactttgaaccagtccatggaaaagataaagttttaggatcagttattggattaaaatccggaacgtatagtttgataattcatcgttacggagatattagtcaaggatgtgattccataggcagtccagaaatatttatcggtaacatctttgtaaacagatatggtgtagcatatgtttatttagatacagatgtaaatatatttacaattattggaaaggcgttatctatttcaaaaaatgatcagagattagcgtgtggagttattggtatttcttacataaatgaaaagataatacattttcttacaattaacgagaatggcgtttgatatatcagttaatgcgtctaaaacaataaatgcattagtttacttttctactcagcaaaataaattagtcatacgtaatgaagttaatgatacacactacactgtcgaatttgatagggacaaagtagttgacacgtttatttcatataatagacataatgacaccatagagataagaggggtgcttccagaggaaactaatattggttgcgcggttagtatgacttacttgtataataagtatagttttaaactgattttagcagaatatataagacacagaaatactatatccggcaatatttattcggcattgatgacactagatgatttggctattaaacagtatggagacattgatctattatttaatgagaaacttaaagtagactccgattcgggactatttgactttgtcaactttgtaaaggatatgatatgttgtgattctagaatagtagtagctctatctagtctagtatctaaacattgggaattgacaaataaaaaatataggtgtatggcattagccgaacatatatctgatagtattccaatatctgagctatctagactacgatacaatctatgtaagtatctacgcggacacactgagagcatagaggataaatttgattattttgaagacgatgattcgtctacatgttctgccgtaaccgacagggaaacggatgtataattttttttatagcgtgaaggatatgataaaaaatataattgttgtatttatcccattccaatcaccttatatgattctgtaacacaataaaggagtcttatagatgtatagaggtcagatactggtttgataaactgtttattccacataagtatgtttgactttatggttagacccgcatactttaacaaatcactgaaaattggagttaggtattgacctctcagaatcagttgccgttctggaacattaaatgtattttttatgatatactccaacgcatttatgtgggcatacaacaagtcattactaatggaatattccaagagttttagttgtctagtatttaacaagagaagagatttcaacagactgtttatgaactcgaatgccgcctcattgtcgcttatattgatgatgtcgaattctcccaatatcatcaccgatgagtagctcatcttgttatcgggatccaagttttctaaagatgtcattaaaccctcgatcatgaatggatttatcatcatcgtttttatgttggacatgagcttagtccgtttgtccacatctatagacgacgatttctgaattatttcatatatccctctctttaactccaggaacttgtcaggatggtctactttaatatgttctcgtctaagagatgaaaatctttggatggttgcacgcgacttttctctaaaggatgacgttgcccaagatcctctcttaaatgaatccatcttatccttggacaagatggacagtctattttccttagatggtttaatatttttgttacccatgatctataaaggtagacctaatcgtctcggatgacctatatatttattttcagttttattatacgcataaattgtaaaaaatatgttaggtttacaaaaatgtctcgtggggcattaatcgtttttgaaggattggacaaatctggaaaaacaacacaatgtatgaacatcatggaatcaataccggcaaacacgataaaatatcttaactttcctcagagatccactgtcactggaaagatgatagatgactatctaactcgtaaaaaaacctataatgatcatatagttaatctattattttgtgcaaatagatgggagtttgcatcttttatacaagaacaactagaacagggaattactttaatagttgatagatacgcgttctctggagtagcgtatgccgccgctaaaggcgcgtcaatgactctcagtaagagttatgaatctggattgcctaaacccgacttagttatattcttggaatctggtagcaaagaaattaatagaaacgtcggtgaggaaatttatgaagatgttacattccaacaaaaggtattacaagaatataaaaaaatgattgaagaaggagatattcattggcaaattatttcttctgaattcgaggaagatgtaaagaaggagttgattaagaatatagttatagaggctatacacacggttactggaccagtggggcaactgtggatgtaatagtgaaattacattttttataaatagatgttagtacagtgttataaatggatgaagcatattactctggcaacttggaatcagtactcggatacgtgtccgatatgcataccgaactcgtatcaatatctcaattagttattgccaagatagaaactatagataatgatatattaaacaaggacattgtaaattttatcatgtgtagatcaaacttggataatccatttatctctttcctagatactgtatatactattatagatcaagagaactatcagaccgagttgattaattcattagacgacaatgaaattatcgattgtatagttaataagtttatgagcttttataaggataacctagaaaatatagtagatgctatcatcactctaaaatatataatgaataatccagattttaaaactacgtatgccgaagtactcggttccagaatagccgatatagatattaaacaagtgatacgtaagaatatactacaattgtctaatgatatccgcgaacgatatttgtgaaaatattaaaaaaaaatactttttttattaaatgacgtcgcttcgcgaatttagaaaattatgctgtgatatatatcacgcatcaggatataaagaaaaatctaaattaattagagactttataacagatagggatgataaatatttgatcattaagctattgcttcccggattagacgatagaatttataacatgaacgataaacaaattataaaattatatagtataatatttaaacaatctcaggaagatatgctacaagatttaggatacggatatataggagacactattaggactttcttcaaagagaacacagaaatccgtccacgagataaaagcattttaactttagaagacgtggatagtttcttaactacgttatcatccgtaactaaagaatcgcatcaaataaaattattgactgatattgcatccgtttgtacatgtaatgatttaaaatgtgtagtcatgcttattgataaagatctaaaaattaaagcgggtcctcggtacgtacttaacgctattagtcctcatgcctatgatgtgtttagaaaatctaataacttgaaagagataatagaaaattcatctaaacaaaatctagactctatatctatttctgttatgactccaattaatcccatgttagcggaatcgtgtgattctgtcaataaggcgtttaaaaaatttccatcaggaatgtttgcggaagtcaaatacgatggtgaaagagtacaagttcataaaaataataacgagtttgccttctttagtagaaacatgaaaccagtactctctcataaagtggattatctcaaagaatacataccgaaagcatttaaaaaagctacgtctatcgtattggattctgaaattgttcttgtagacgaacataatgtaccgctcccgtttggaagtttaggtatacacaaaaagaaagaatataaaaactctaacatgtgtttgttcgtgtttgactgtttgtactttgatggattcgatatgacggacattccattgtacgaacgaagatcttttctcaaagatgttatggttgaaatacccaatagaatagtattctcagagttgacgaatattagtaacgagtctcagttaactgacgtattggatgatgcactaacgagaaaattagaaggattggtcttaaaagatattaatggagtatacgaaccgggaaagagaagatggttaaaaataaagcgagactatttgaacgagggttccatggcagattctgccgatttagtagtactaggtgcctactatggtaaaggagcaaagggtggtatcatggcagtctttctaatgggttgttacgacgatgaatccagtaaatggaagacggttaccaagtgttcaggacacgatgataatacgttaagggagttgcaagaccaattaaagatgattaaaattaacaaggatcccaaaaaaattccagagtggttagtagttaataaaatctatattcccgattttgtagtagaggatccgaaacaatctcagatatgggaaatttcaggagcagagtttacatcttccaagtcccataccgcaaatggaatatccattagatttcctagatttactaggataagagaggataaaacgtggaaagaatctactcatctaaacgatttagtaaacttgactaaatcttaatagttacatacaaactgaaaattaaaataacactatttagttggtggtcgccatggatggtgttattgtatactgtctaaacgcgctagtaaaacatggcgaggaaataaatcatataaaaaatgatttcatgattaaaccatgttgtgaaagagtttgtgaaaaagtcaagaacgttcacattggcggacaatctaaaaacaatacagtgattgcagatttgccatatatggataatgcggtatccgatgtatgcaattcactgtataaaaagaatgtatcaagaatatccagatttgctaatttgataaagatagatgacgatgacaagactcctactggtgtatataattattttaaacctaaagatgccattcctgttatcatatctataggaaaggataaagatgtctgtgaactattaatctcatcagacatatcgtgtgcatgcgtggagttaaattcatatcacgtagccattcttcccatggatgtttccttttttaccaaaggaaatgcatcattgattattctcctgtttgatttctctatcgatgcggcacctctcttaagaagtgtaaccgataataatgttattatatctagacaccagcgtctacatgacgagcttccgagttccaattggttcaagttttacataagtataaagtccgactattgttctatattatatatggttgttgatggatctgtgatgcatgcgatagctgataatagaactcacgcaattattagcaaaaatatattagacaatactacgattaacgatgagtgtagatgctgttattttgaaccacagattaggattcttgatagagatgagatgctcaatggatcatcgtgtgatatgaacagacattgtattatgatgaatttacctgatgtaggcgaatttggatctagtatgttggggaaatatgaacctgacatgattaagattgctctttcggtggctggtaatttaataagaaatcgagactacattcccgggagacgaggatatagctactacgtttacggtatagcctctagataatttttttaagcacgaaataaaaaacataattttaaaccaatctatttcatactattttgtgtgatcaccatggacataaagatagatattagtatttctggtgataaatttacggtgactactaggagggaaaatgaagaaagaaaaaaatatctacctctccaaaaagaaaaaactactgatgttatcaaacctgattatcttgagtacgatgacttgttagatagagatgagatgtttactattctagaggaatattttatgtacagaggtctattaggcctcagaataaaatatggacgactctttaacgaaattaaaaaattcgacaatgatgcggaagaacaattcggtactatagaagaactcaagcagaaacttagattaaattctgaagagggagcagataactttatagattatataaaggtacaaaaacaggatatcgtcaaacttactgtatacgattgcatatctatgataggattgtgtgcatgcgtggtagatgtttggagaaatgagaaactgttttctagatggaaatattgtttacgagcgattaaactgtttattaatgatcacatgcttgataagataaaatctatactgcagaatagactagtatatgtggaaatgtcatagaaagttaaaagttaatgagagcaaaaatatataaggttgtattccatatttgttattttttctgtaatagttaaaaaatacattcgatggtctatctatcagattattatgtgttataaggtactttttctcataataaactagagtatgagtaagatagtgtttttcaaaacatataaatctaaaattgatggatgagatatacagctattaatttcgaaaatatattttaatctgataactttaaacatggatttttgatggtggtttaacgttttaaaaaaagattttgttattgtagtatatgataatattaaaagatggatataaagaatttgctgactgcatgtactattttttacattactacattggctacggcagatatacctacttcgtcactgccacacgctccggtaaacggggcatgtgacgagggagaatatcttgataagaggcataatcaatgttgtaatcagtgtccacctggagaatttgccaaggtcagatgtaatggtaacgataacacaaaatgtgaacgctgcccacctcatacatataccgcaatccccaattactctaatggatgtcatcaatgtagaaaatgcccaacaggatcatttgataaggtaaagtgtaccggaacacagaacagtaaatgttcgtgtcttcctggttggtattgcgctactgattcttcacagactgaagattgtcgagattgtataccaaaaaggagatgtccatgcggatactttggtggaatagatgaacaaggaaatcctatttgtaaatcgtgttgtgttggtgaatattgcgactacctacgtaattatagacttgatccatttcctccatgcaaactatctaaatgtaattaattatgattttgatgataatgttaccatacattatatcgctacttggttagtgtattattcagtatgaagacctattaataattacttatcttttgacgatcttgttataattataatataaaaacttatggcatagtaacttataattgctgacgcgataaattcgtaataatctgttttgttcaaaggaatctacaggcataaaaataaaaatataatttataatatactcttacagcgcgccatcatgaataacagcagtgaattgattgctgttattaatggatttagaaatagtggacgattttgtgatattagtatagttattaatgatgaaatgataaacgctcacagactcatcctatctggagcctccgaatatttttccattctgttttccaataattttatcgattctaatgaatacgaagttaatctaagtcatttagattatcaaagcgtaaacgatttgatcgattacatttatgggatacctttgagcctaactaacgataacgtgaaatatattctttcaaccgctgattttttacaaattggatctgccattactgagtgcgaaaaatacatacttaaaaatctttgttctagaaactgtatcgatttctacatatacgctgataaatataataacaagaaaatagaatcagcgtcgtttaacacaatattacaaaatattttgagactcatcaacgatgaaaactttaaatacttaacagaggaatcaatgataaaaattttaagcgatgatatgttaaatataaaaaatgaggatttcgccccactaattctcattaaatggttagagagtactcaacaaccatgcaccgtcgagttacttaaatgcctcagaatatcattgctttccccacaagttataaaatcactttatagtcatcgactggttagttcaatctacgaatgtataacattcttaaacaatatagcattcttggatgaatcatttcctagataccatagcatcgagttgatatctatcggtataagtaattcgcatgataagatttccataaactgctacaatcataaaaaaaatacatgggaaatgatatcttcacgtagatataggtgtagtttcgcagtggccgtcctggataatattatttatatgatgggtggatatgatcagtccccgtatagaagttcaaaggttatagcgtacaatacatgtacaaattcttggatatatgatataccagagctaaaatatcctcgttctaattgtgggggactggctgatgacgaatacatttattgtataggcggcatacgcgatcaggattcatcgttgacatctagtattgatagatggaagccatcaaaaccatattggcagaagtatgctaaaatgcgcgaaccaaaatgtgatatgggggttgcgatgttaaacggattaatatatgttataggtggaatcgttaaaggtgacacgtgtaccgacgcactagagagtttatcagaagatggatggatgaagcatcaacgtcttccaataaaaatgtccaatatgtcgacgattgttcatgatggcaagatttatatatctggaggttacaacaatagtagtgtagttaatgtaatatcgaatttagtccttagctataattcgatatatgatgaatggaccaaattatcatcattaaacattcctagaattaatcccgctctatggtcagcgcataataaattatatgtaggaggaggaatatctgatgatgttcgaactaatacatctgaaacatacgacaaagaaaaagattgttggacattggataatggtcacgtgttaccacgcaattatataatgtataaatgcgaaccgattaaacataaatatccattggaaaaaacacagtacacgaatgattttctaaagtatttggaaagttttataggtagttgatagaacaaaatacataattttgtaaaaataaatcactttttatactaatatgacacgattaccaatacttttgttactaatatcattagtatacgctacaccttttcctcagacatctaaaaaaataggtgatgatgcaactctatcatgtaatcgaaataatacaaatgactacgttgttatgagtgcttggtataaggagcccaattccattattcttttagctgctaaaagcgacgtcttgtattttgataattataccaaggataaaatatcttacgactctccatacgatgatctagttacaactatcacaattaaatcattgactgctagagatgccggtacttatgtatgtgcattctttatgacatcgcctacaaatgacactgataaagtagattatgaagaatactccacagagttgattgtaaatacagatagtgaatcgactatagacataatactatctggatctacacattcaccggaaactagttctgagaaacctgattatatagataattctaattgctcgtcggtattcgaaatcgcgactccggaaccaattactgataatgtagaagatcatacagacaccgtcacatacactagtgatagcattaatacagtaagtgcatcatctggagaatccacaacagacgagactccggaaccaattactgataaagaagatcatacagtcacagacactgtctcatacactacagtaagtacatcatctggaattgtcactactaaatcaaccaccgatgatacgtacaatgataatgatacagtaccaccaactactgtaggcggtagtacaacctctattagcaattataaaaccaaggactttgtagaaatatttggtattaccgcattaattatattgtcggccgtggcaatattctgtattacgtattatatatgtaataaacgttcacgtaaatacaaaacagagaacaaagtctagatttttgacttacataaatgtctgggatagtaaaatctatcatattgagcgggccatctggtttaggaaagacagccatagccaaaagactatgggaatatatttggatttgtggtgtcccataccactagatttcctcgtcctatggaacgagaaggtgtcgattaccattacgttaacagagaggccatctggaagggaatagccgccggaaactttctagaacatactgagtttttaggaaatatttacggaacttctaaaactgctgtgaatacagcggctattaataatcgtatttgtgtgatggatctaaacatcgatggcgttagaagtcttaaaaatacgtacctaatgccttactcggtgtatataagacctacctctcttaaaatggttgagaccaagcttcgttgtagaaacactgaagcggatgatgagattcatcgtcgtgtgatgttggcaaaaactgacatggatgaggcaggtgaagccggtctattcgacactattatcattgaagatgatgtgaatttagcatatagtaagttaattcagatactacaggaccgtattagaatgtattttaacactaattagagacttaagacttaaaacttgataattaataatataactcgtttttatatgtggctatttcaacgtctaatgtattagttaaatattaaaacttaccacgtaaaacttaaaatttaaaatgatatttcattgacagatagatcacacattatgaactttcaaggacttgtgttaactgacaattgcaaaaatcaatgggtcgttggaccattaataggaaaaggtggatttggtagtatttatactactaatgacaataattatgtagtaaaaatagagcccaaagctaacggatcattatttaccgaacaggcattttatactagagtacttaaaccatccgttatcgaagaatggaaaaaatctcacaatataaagcacgtaggtcttatcacgtgcaaggcatttggtctatacaaatccattaatgtggaatatcgattcttggtaattaatagattaggtgcagatctagatgcggtgatcagagccaataataatagactaccaaaaaggtcggtgatgttgatcggaatcgaaatcttaaataccatacaatttatgcacgagcaaggatattctcacggagatattaaagcgagtaatatagtcttggatcaaatagataagaataaattatatctagtggattacggattggtttctaaattcatgtctaatggcgaacatgttccatttataagaaatccaaataaaatggataacggtactctagaatttacacctatagattcgcataaaggatacgttgtatctagacgtggagatctagaaacacttggatattgtatgattagatggttgggaggtatcttgccatggactaagatatctgaaacaaagaattgtgcattagtaagtgccacaaaacagaaatatgttaataatactgcgactttgttaatgaccagtttgcaatatgaacctagagaattgctgcaatatattaccatggtaaactctttgacatattttgaggaacccaattacgacaagtttcggcacatattaatgcagggtgtatattattaagtgtggtgtttggtcgataaaaattaaaaaataacttaatttattattgatctcgtgtgtacaaccgaaatcatggcgatgttttacgcacacgctctcggtgggtacgacgagaatcttcatgcctttcctggaatatcatcgactgttgccaatgatgtcaggaaatattctgttgtgtcagtttataataacaagtatgacattgtaaaagacaaatatatgtggtgttacagtcaggtgaacaagagatatattggagcactgctgcctatgtttgagtgcaatgaatatctacaaattggaaatccgatccatgatcaagaaggaaatcaaatctctatcatcacatatcgccacaaaaactactatgctctaagcggaatcgggtacgagagtctagacttgtgtttggaaggagtagggattcatcatcacgtacttgaaacaggaaacgctgtatatggaaaagttcaacatgattattctactatcaaagagaaggccaaagaaatgagtgcacttagtccaggacctatcatcgattaccacgtctggataggagattgtatctgtcaagttactgctgtggacgtacatggaaaggaaattatgaaaatgagattcaaaaagggtgcggtgcttccgatcccaaatctggtaaaagttaaacttggggagaatgatacagaaaatctttcttctactatatcggcgacaccatcgaggtaaccacctctctggaagacagcgtgaataatgtactcatgaaacgtttggaaactatacgccatatgtggtctgttgtatatgatcattttgatattgtgaatggtaaagaatgctgttatgtgcatacgcatttgtctaatcaaaatcttataccgagtactgtaaaaacaaatttgtacatgaagactatgggatcatgcattcaaatggattccatggaagctctagagtatcttagcgaactgaaggaatcaggtggatggagtcccagaccagaaatgcaggaatttgaatatccagatggagtggaagacactgaatcaattgagagattggtagaggagttcttcaatagatcagaacttcaggctggtgaatcagtcaaatttggtaattctattaatgttaaacatacatctgtttcagctaagcaactaagaacacgtatacggcagcagcttccttctatactctcatcttttaccaacacaaagggtggatatttgttcattggagttgataataatacacacaaagtatttggattcacggtgggttacgactacctcagactgatagagaatgatatagaaaagcatatcaaaagactttgtgttgtgtatttctgtgagaagaaagaggacatcaagtacgcgtgtcgattcatcaaggtatataaacctggggatgaggctacctcgacatacgtgtgcgctatcaaagtggaaagatgctgttgtgctgtgtttgcagattggccagaatcatggtatatggatactaatggtatcaagaagtattctccagatgaatgggtgtcacatataaaattttaattaatgtaactatagagaacaaataataaggttgtaatatcatatagacaataactaacaattaattagtaactgttatctcttttttaattaaccaactaactatatacctattaatacatcgtaattatagttcttaacatctattaatcattaattcgcttctttaattttttataaactaacattgttaattgaaaagggataacatgttacagaatataaattatatatggatttttttaaaaaggaaatacttgactggagtatatatttatctcttcattatatagcacgcgtgttttccaatttttccacatcccatataatacaggattataatctcgttcgaacatacgagaaagtggataaaacaatagttgattttttatctaggttgccaaatttattccatattttagaatatggggaaaatattctacatatttattctatggatgatgctaatacgaatattataattttttttctagatagagtattaaatattaataagaacgggtcatttatacacaatctcgggttatcatcatccattaatataaaagaatatgtatatcaattagttaataatgatcatccagataataggataagactaatgcttgaaaatggacgtagaacaagacattttttgtcctatatatcagatacagttaatatctatatatgtattttaataaatcatggattttatatagatgccgaagacagttacggttgtacattattacatagatgtatatatcactataagaaatcagaatcagaatcatacaatgaattaattaagatattgttaaataatggatcagatgtagataaaaaagatacgtacggaaacacaccttttatcctattatgtaaacacgatatcaacaacgtggaattgtttgagatatgtttagagaatgctaatatagactctgtagactttaatagatatacacctcttcattatgtctcatgtcgtaataaatatgattttgtaaagttattaatttctaaaggagcaaatgttaatgcgcgtaataaattcggaactactccattttattgtggaattatacacggtatctcgcttataaaactatatttggaatcagacacagagttagaaatagataatgaacatatagttcgtcatttaataatttttgatgctgttgaatctttagattatctattatccagaggagttattgatattaactatcgtactatatacaacgaaacatctatttacgacgctgtcagttataatgcgtataatacgttggtctatctattaaacaaaaatggtgattttgagacgattactactagtggatgtacatgtatttcggaagcagtcgcaaacaacaacaaaataataatggaagtactattgtctaaacgaccatctttgaaaattatgatacagtctatgatagcaattactaaacataaacagcataatgcagatttattgaaaatgtgtataaaatatactgcgtgtatgaccgattatgatactcttatagatgtacagtcgctacagcaatataaatggtatattttaagatgtttcgatgaaatagatatcatgaagagatgttatataaaaaataaaactgtattccaattagttttttgtatcaaagacattaatactttaatgagatacggtaaacatccttctttcgtgaaatgcactagtctcgacgtatacggaagtcgtgtacgtaatatcatagcatctattagatatcgtcagagattaattagtctattatccaagaagctggatcctggagataaatggtcgtgttttcctaacgaaataaaatataaaatattggaaaactttaacgataacgaactatccacatatctaaaaatcttataaacattattaaaatataaaatctaagtaggataaaatcacactacatcattgtttccttttagtgctcgacagtgtatactatttttaacgctcataaataaaaatgaaaacgatttccgttgttacgttgttatgcgtactacctgctgttgtttattcaacatgtactgtacccactatgaataacgctaaattaacgtctaccgaaacatcgtttaatgataaccagaaagttacgtttacatgtgatcagggatatcattctttggatccaaatgctgtctgtgaaacagataaatggaaatacgaaaatccatgcaaaaaaatgtgcacagtttctgattatgtctctgaactatataataaaccgctatacgaagtgaattccaccatgacactaagttgcaacggcgaaacaaaatattttcgttgcgaagaaaaaaatggaaatacttcttggaatgatactgttacgtgtcctaatgcggaatgtcaacctcttcaattagaacacggatcgtgtcaaccagttaaagaaaaatactcatttggggaatatatgactatcaactgtgatgttggatatgaggttattggtgcttcgtacataagttgtacagctaattcttggaatgttattccatcatgtcaacaaaaatgtgatatgccgtctctatctaacggattaatttccggatctacattttctatcggtggcgttatacatcttagttgtaaaagtggttttacactaacggggtctccatcatccacatgtatcgacggtaaatggaatcccatactcccaatatgtgtacgaactaacgaaaaatttgatccagtggatgatggtcccgacgatgagacagatttgagcaaactctcgaaagacgttgtacaatatgaacaagaaatagaatcgttagaagcaacttatcatataatcatagtggcgttgacaattatgggcgtcatatttttaatctccgttatagtattagtttgttcctgtgacaaaaataatgaccaatataagttccataaattgctaccgtaaatataaatccgttaaaataattaataatttaataacaaacaagtatcaaaagattaaagacttatagctagaatcaattgagatgtcttcttcagtggatgttgatatctacgatgccgttagagcatttttactcaggcactattataacaagagatttattgtgtatggaagaagtaacgccatattacataatatatacaggctatttacaagatgcgccgttataccgttcgatgatatagtacgtactatgccaaatgaatcacgtgttaaacaatgggtgatggatacacttaatggtataatgatgaatgaacgcgatgtttctgtaagcgttggcaccggaatactattcatggaaatgtttttcgattacaataaaaatagtatcaacaatcaactaatgtatgatataattaatagcgtatctataattctagctaatgagagatatagaagcgcttttaacgacgatggtatatacatccgtagaaatatgattaacaagttgtacggatacgcatctctaactactattggcacgatcgctggaggtgtttgttattatctgttgatgcatctagttagtttgtataaataattatttcaatatactagttaaaattttaagattttaaatgtataaaaaactaataacgtttttatttgtaataggtgcagtagcatcctattcgaataatgagtacactccgtttaataaactgagtgtaaaactctatatagatggagtagataatatagaaaattcatatactgatgataataatgaattggtgttaaattttaaagagtacacaatttctattattacagagtcatgcgacgtcggatttgattccatagatatagatgttataaacgactataaaattattgatatgtataccattgactcgtctactattcaacgcagaggtcacacgtgtagaatatctaccaaattatcatgccattatgataagtacccttatattcacaaatatgatggtgatgagcgacaatattctattactgcagagggaaaatgctataaaggaataaaatatgaaataagtatgatcaacgatgatactctattgagaaaacatactcttaaaattggatctacttatatatttgatcgtcatggacatagtaatacatattattcaaaatatgatttttaaaaatttaaaatatattatcacttcagtgacagtagtcaaataacaaacaacaccatgagatatattataattctcgcagttttgttcattaatagtatacatgctaaaataactagttataagtttgaatccgtcaattttgattccaaaattgaatggactggggatggtctatacaatatatcccttaaaaattatggcatcaagacgtggcaaacaatgtatacaaatgtaccagaaggaacatacgacatatccgcatttccaaagaatgatttcgtatctttctgggttaaatttgaacaaggcgattataaagtggaagagtattgtacgggactatgcgtcgaagtaaaaattggaccaccgactgtaacattgactgaatacgacgaccatatcaatttgtacatcgagcatccgtatgctactagaggtagcaaaaagattcctatttacaaacgcggtgacatgtgtgatatctacttgttgtatacggctaacttcacattcggaaattctaaagaaccagtaccatatgatatcgatgactacgattgcacgtctacaggttgcagcatagactttgccacaacagaaaaagtgtgcgtgacagcacagggagccacagaagggtttctcgaaaaaattactccatggagttcgaaagtatgtctgacacctaaaaagagtgtatatacatgcgcaattagatccaaagaagatgttcccaatttcaaggacaaaatggccagagttatcaagagaaaatttaatacacagtctcaatcttatttaactaaatttctcggtagcacatcaaatgatgttaccacttttcttagcatgcttaacttgactaaatattcataactaatttttattaatgaaataaaactgcatattatacactggttaacgcccttataggctctaaccattttcaagatgaggtccctgattatagtccttctgttcccctccatgtctattagacgatgtgagaagactgaagaggaaacatggggattgaaaatagggttgtgtataattgccaaagatttttatcccgaaagaactgattgcagtgttcatctcccaactgcaagtgaaggattcagggatatacgaaacaccgataaattataaaaaaagcaatgtgtccgctgtttccgttaataatactattttcgtaactggcggattattcataaataactctaatagcacgatcgtggacatttataaagacaaacaatggtcgattatagaaatgcctatggctagggtatatcacggcatcgactcgacatttggaatgttatattttgccggaggtctatccgttaccgaacaatatggtaatttagagaaaaacaacgagatatcttgttacaatcctagaacgaataagtggtttgatatttcatatactatttataagatatccatatcatcattgtgtaaactaaataacgtcttctatgtatttagtaaggacattggatatgtggaaaagtatgatggtgcatggaagttagtacatgatcgtctccccgctataaaggcattatcaacttctccttattgattgaaaatataaatagtttttatgtatagcagtattaccctatagttttattgcttactactaacatggatacagatacagatacagatacagatacagatacagatacagatgttacaaatgtagaagatatcataaatgaaatagatagagagaaagaagaaatactaaaaaatgtagaaattgaaaataataaaaacattaacaagaatcatcccaatgaatatattagagaagcactcgttattaataccagtagtaatagtgattccattgataaagaagttatagaatgtatcagtcacgatgtaggaatatagatcatatctactaatttttataatcgatacaaaacataaaaaacaactcgttattacatagcaggcatggaatccttcaagtattgttttgataacgatggcaagaaatggattatcggaaatactttatattctggtaattcaatactatataaggtcagaaaaaatttcactagttcgttctacaattacgtaatgaagatagatcacaaatcacacaagccattgttgtctgaaatacgattctatatatctgtattggatcctttgactatcgacaactggacacgggaacgtggtataaagtatttggctattccagatctgtatggaattggagaaaccgatgattatatgttcttcgttataaagaattcgggaagagtattcgccccaaaggatactgaatcagtcttcgaagcatgcgtcactatgataaacacgttagagtttatacactctcaaggatttacccatggaaaaatagaaccgaggaatatactgattagaaataaacgtctttcactaattgactattctagaactaacaaactatacaagagtggaaactcacatatagattacaacgaggacatgataacttcaggaaatatcaattatatgtgtgtagacaatcatcttggagcaacagtttcaagacgaggagatttagaaatgttgggatattgcatgatagaatggttcggtggcaaacttccatggaaaaacgaaagtagtataaaagtaataaaacaaaaaaaagaatataaaaaatttatagctactttctttgaggactgttttcctgaaggaaatgaacctctggaattagttagatatatagaattagtatacacgttagattattctcaaactcctaattatgacagactacgtaaactgtttatacaagattgaaattatattcttttttttatagagtgtggtagtgttacggatatttaatattagactatctctatcgcgctacacgaccaatatcgattactatggatatcttctatgaaaggagagaatgtattcatttctccagcgtcaatctcgtcagtattgacaatactgtattatggagctaatggatccactgctgaacagctatcgaaatatgtagaaaaggaggagaacacggataaggttagcgctcagaatatctcattcaaatccatgaataaagtatatgggcgatattctgccgtgtttaaagatttctttttgggaaaaattggcgataagtttcaaactgttgacttcactgattgtcgcactatagatgcaatcaacaagtgtgtagatatctttactgaggggaaaatcaatccactattggatgaaccattgtctcctagcaattagtgccgtatactttaaagcaaaatggttgacgccattcgaaaaggaatttaccagtgattatcccttttacgtatctccgacggaaatggtagacgtaagtatgatgtctatgtacggcgagctatttaatcacgcatctgtaaaagaatcattcggcaacttttcaatcatagaactgccatatgttggagatactagtatgatggtcattcttccagacaagattgatggattagaatccatagaacaaaatctaacagatacaaattttaagaaatggtgtgactctctggaagctacgtttatcgatgttcacattcccaagtttaaggtaacaggctcgtataatctggtggatactctagtaaagtcaggactgacagaggtgttcggttcaactggagattatagcaatatgtgtaatttagatgtgagtgtcgacgctatgatccacaaaacgtatatagatgtcaatgaagagtatacagaagcagctgcagcaacttctgtactagtggcagactgtgcatcaacaattacaaatgagttctgtgtagatcatccgttcatctatgtgattaggcatgttgatggcaaaattcttttcgttggtagatattgctctccgacaactaattgttaaccattttttttaaaaaaaatagaaaaaacatgtggtattagtgcaggtcgttgttcttccaattgcaattggtaagatgacggccaactttagtacccacgtcttttcaccacagcactgtggatgtgacagactgaccagtattgatgacgtcaaacaatgtttgactgaatatatttattggtcgtcctatgcataccgcaacaggcaatgcgctggacaattgtattccacactcctctcttttagagatgatgcggaattagtgttcatcgacattcgcgagctggtaaaaaatatgccgtgggatgatgtcaaagattgtacagaaatcatccgttgttatataccggatgagcaaaaaaccatcagagagatttcggccatcatcggactttgtgcatatgctgctacttactggggaggtgaagaccatcccactagtaacagtctgaacgcattgtttgtgatgcttgagatgctaaattacgtggattataacatcatattccggcgtatgaattgatgagttgtacatcttgacattttctttcttctcttctccctttcttctcttctccctttcttctcttctcccttcctccctcttctccctttcccagaaacaaacttttttacccactataaaataaaatgagtatactacctgttatatttctttctatatttttttattcttcattcgttcagacttttaacgcgcctgaatgtatcgacaaagggcaatattttgcatcattcatggagttagaaaacgagccagtaatcttaccatgtcctcaaataaatacgctatcatccggatataatatattagatattttatgggaaaaacgaggagcggataatgatagaattataccgatagataatggtagcaatatgctaattctgaacccgacacaatcagactctggtatttatatatgcattaccacgaacgaaacctactgtgacatgatgtcgttaaatttgacaatcgtgtctgtctcagaatcaaatatagatcttatctcgtatccacaaatagtaaatgagagatctactggcgaaatggtatgtcccaatattaatgcatttattgctagtaacgtaaacgcagatattatatggagcggacatcgacgccttagaaataagagacttaaacaacggacacctggaattattaccatagaagatgttagaaaaaatgatgctggttattatacatgtgttttagaatatatatacagaggtaaaacatataacgtaaccagaattgtaaaattagaggtacgggataaaataataccttctattatgcaattaccagatggcattgtaacttcaataggtagtaatttgactattgcgtgtagagtatcgttgagacctcccacaacggatgcagacgtcttttggataagtaatggtatgtattacgaagaagatgatggggacggaaacggtagaataagtgtagcaaataaaatctatatgaccgataagagacgtgttattacatcccggttaaacattaatcctgtcaaggaagaagatgctacaacgtttacgtgtatggcgtttactattcctagcatcagcaaaacagttactgttagtataacgtgaatgtatgttgttacatttccatgtcaattgagtttataagaatttttatacattatcttccaacaaacaattgacgaacgtattgctatgattaactcccacgatactatgcatattattaatcattaacttgcaaactatacctagtgctattttgacatactcatgttcttgtgtaattgcggtatctatattattaaagtacgtaaatctagctatagttttattatttaattttagataatataccgtctccttatttttaaaaattgccacatcctttattaaatcatgaatgggaatttctatgtcatcgttagtatattgtgaacaacaagagcagatatctataggaaagggtggaatgcgatacattgatctatgtagttttaaaacacacgcgaactttgaagaatttatataaatcattccatcgatacatccttctatgttgagatgtatatatccaggaattcgtttattaatatcgggaaatgtataaactaaaacattgcccgaaagcggtgcctctatctgcgttatatccgttcttaacttacaaaatgtaaccaatacctttgcatgacttgttttgttcggcaacgttagtttaaacttgacgaatggattaattacaatagcatgatccgcgcatctattaagtttttttactttaacgcccttgtatgtttttacagagactttatctaaatttctagtgcttgtatgtgttataaatataacgggatatagaaccgaatcacctaccttagatacccaattacattttatcagatccagataataaacaaattttgtcgccctaactaattctatattgttatatattttacaattggttatgatatcatgtaataacttggagtctaacgcgcatcgtcgtacgtttatacaattgtgatttagtgtagtatatctacacatgtatttttccgcactatagtattctggactagtgataaaactatcgttatatctgtcttcaatgaactcatcgagatattgctctctgtcatattcatacacctgcataaactttctagacatcttacaatccgtgttattttaggatcatatttacatatttacgggtatatcaaagatgttagattagttaatgggaatcgtctataataatgaatattaaacaattatatgaggacttttaccacaaagcatcataaaaatgagtcgtcgtctgatttatgttttaaatatcaaccgcgaatcaactcataaaatacaagagaatgaaatatatacatattttagtcattgcaatatagaccatacttctacagaacttgattttgtagttaaaaactatgatctaaacagacgacaacctgtaactgggtatactgcactacactgctatttgtataataattactttacaaacgatgtactgaagatattattaaatcatggagtggatgtaacgatgaaaaccagtagcggacgtatgcctgtttatatattgcttactagatgttgcaatatttcacatgatgtagtgatagatatgatagacaaagataaaaaccacttatcgcatagagactattccaacctactactagagtatataaaatctcgttacatgttattgaaggaagaggatatcgatgagaacatagtatccactttattagataagggaatcgatcctaactttaaacaagacggatatacagcgttacattattattatttgtgtctcgcacacgtttataaaccaggtgagtgtagaaaaccgataacgataaaaaaggccaagcgaattatttctttgtttatacaacatggagctaatctaaacgcgttagataattgtggtaatacaccattccatttgtatcttagtattgaaatgtgtaataatattcatatgactaaaatgctgttgacttttaatccgaatttcgaaatatgtaataatcatggattaacgcctatactatgttatataacttccgactacatacaacacgatattcttgttatgttaatacatcactatgaaacaaatgttggagaaatgccgatagatgagcgtcgtatgatcgtattcgagtttatcaaaacatattctacacgtccggcagattcgataacttatttgatgaataggtttaaaaatataaatatttatacccgctatgaaggaaagacattattacacgtagcatgtgaatataataatacacaagtaatagattatcttatacgtatcaacggagatataaatgcgttaaccgacaataacaaacacgctacacaactcattatagataacaaagaaaattccccatataccattaattgtttactgtatatacttagatatattgtagataagaatgtgataagatcgttggtggatcaacttccatctctacctatctttcgtcgcttatcatactagtcatatcctaaatgttgatcatattccaccaaatgattgtgaaagagattgagattaaatcgtctaacaaacaattagtttttatgacattaacatataataaataaattaatcattattgacttaacgatgacgaaagttatcatcatcttaggattcttgattattaatacaaattcattgtctatgaaatgtgaacaaggtgtctcatattataattcacaagaattaaagtgttgtaaactatgtaagccaggaacatattcagatcatcgatgtgataaatacagcgataccatttgtggacattgtccgagtgacacattcacgtcaatatataatcgttctccttggtgtcatagttgtagaggtccatgtggtactaatcgagtagaggtcacaccttgtacacctaccacaaatagaatctgtcattgtgactcgaatagttattgtctccttaaagcttctgatggtaactgtgttacatgtgctcctaaaacaaaatgtggtcgtgggtatggaaagaaaggagaagatgaaatgggtaataccatttgtaagaaatgtcggaagggtacttattcagatattgtatctgactctgatcaatgtaaaccaatgacaagataagacttactcgcatctactggatagacataaaatatcctcctcgtaataatgaaatataatatacactaattattaatatcaataacaatcgagtattaatatataggtcatttttaaatcccttttgggttccgtcccaaacggcgtttcggtctgcgtcgccgccatggccatgccgagcctctccgcgtgctcctccatcgaggacgacttcaactatggcagctcggtggcgtctgccagcgtgcacatacgaatggcatttctaagaaaagtctacggtatcctttgtctacaatttcttttaacaacggcaacaactgcagtatttttatactttgactgcatgcggacatttatacaagggagtcctgttctaatattggcatcaatgttcggatctataggcttgattttcgcattgactttacacagacataaacatcccctgaatctgtacctgctttgtggatttacactgtcggaatctctaacgctggcctctgttgttactttctatgatgtgcatgtcgttatgcaagctttcatgctgactactgcagcgtttcttgctctgactacatatactctacaatcaaagagagatttcagtaaacttggagcaggattgtttgctgctttgtggattttaattttgtcaggactcttggggatatttgtgcaaaatgagacagtggagctggtcctgtctgcttttggggcccttgtattctgtggattcattatctatgacacgcactcactaatacataagctctcgcctgaagagtatgtgttagcctctatcaatctctacttggatatcatcaatctgttcttgcatctgttgcagcttttggaagtatctaataagaaataaagtttaaaatagaattaataaaaacatataggtcattttttaaacatggattggaaaccaaggtagttagttaatacacacaagatatatttttttcacatcatccacccatgggtaacaccaaggttgttagttaataatatacaagatattttttctcactctgatccatgtaaaccaaggacgagataagacactctcattcctcatccacaacccattaaaaaaatggaaattaaagccctctattagcataaacggctacaggtctacctttacaatggcctttccttgtgcccagttcagaccctgtcattgccacgctactaaggactccctgaataccgtggccgacgtcagacattgtctgactgaatacatcctgtgggtttctcatagatggacccatagagaaagcgcagggtctctctacaggcttctcatctctttcagaactgatgcaacggagctctttggtggtgagttgaaggattcacttccgtgggacaattgcgtggagatcattaaatgtttcatcagaaatgactccatgaaaaccgccgaagaacttcgtgcaatcattggactttgtactcaatcagctatcgtctctggaagagtcttcaacgataagtatatcgacatactacttatgctgcgaaagattctgaacgagaacgactatctcaccctcttggatcatatccgcactgctaaatactaaatctccttcatgctctctcactacactttttatcatcttatgaggaatgattgccttcgtgaaataggaataattagcaccagaatagctatggattattgtggtagagagtgcactattctatgtcgtctactggatgaagatgtgacgtacaaaaaaataaaaccagagattgaaacgtgtcacaacttatcaaaacatatagatagacgaggaaacaatgcgctacattgttacgtcttcaataaatgcgatacagacattaagattgttcggctgttactctctcgcggagtcgagagactttgtagaaacaacgaaggattaactccgctaggagcatacagtaagcatagatacgtaaaatctcagattgtgcatctactgatatccagctattcaaattcctctaacgaactcaagtcgaatataaatgatttcgatctgtattcggataatatcgacttacgtctgctaaaatacctaattgtggataaacggatacgtccgtccaagaatacgaattatgcaatcaatggtctcggattggtggatatatacgtaacgacgcctaatccgagaccagaagtattgctatggcttcttaaatcagaatgttacagcaccggttacgtatttcgtacctgtatgtacgacagtgatatgtgtaagaactctcttcattactatatatcgtctcatagagaatctcaatctctatccaaggatgtaattaaatgtttgatcgataacaatgtttccatccatggcagagacgaaggaggatctttacccatccaatactactggtctttctcaaccatagatatagagattgttaaattattattaataaaggatgtggacacgtgtagagtatacgacgtcagccctatattagaggcgtattatctaaacaagcgatttagagtaaccccatataatgtagacatggaaatcgttaatcttcttattgagagacgtcatactcttgtcgacgtaatgcgtagtattacttcgtacgattccagagaatataaccactacatcatcgataacattctaaagagatttagacaacaggatgtacaagccatgttgataaactacttacattacggcgatatggtcgttcgatgcatgttagataacggacaacaactatcctctgcacgactactttgttaataataatctcgtcgatgtaaacgtcgtaaggtttatcgtggaaaatatggacacgcggctgtaaatcacgtatcgaacaatggccgtctatgtatgtacggtctgatattatcgagatttaataattgcgggtatcactgttatgaaaccatactgatagatgtatttgatatactaagcaagtacatggatgatatagatatgatcgataactctactatattacgcggtcgatgtcaataatatacaatttgcaaagcggttattggaatatggagcgagtgtcacgctcgataatcaatacggccatccagaaaagcagttaccaaagagaaaacaaaacgaagctagttgatttattactgagttaccatcccactctagagactatgattgacgcatttaatagagatatacgctatctatatcctgaaccattattcgcctgtatcagatacgccttaatcctagatgatgattttccttctaaagtaaagtatgatatcgccggtcgtcataaggaactaaagcgctatagagtagacattaatagaatgaagaatgtctacatatcaggcgtctccatgtttgatatattatttaaacgaagcaaacgccacaaattgagatacgcaaagaatccgacatcaaatggtacaaaaaagaactaacgtccatcattacagaaactgtaaagaacaatgagaggatcgactccatagtggacaacattaatacagacgataacttgatttcgaaattacccatggagatactttattactccattaaataatttatcatggagcgataatgtcctgtttcatttgtttccatgacatattacaaaatcgattccgtccaagatgataaaaacatttaccggcatcataaacacggagtttattttatatgtctcgcataaacattactaaaaaaatatattgttcggttttctttcacatctttaattatgaaaaagtaaatcattatgagatggacgagattgtacgcatcgttcgcgacagtatgtggtacatacctaacgtatttatggacgacggtaagaatgaaggtcacgtttctgtcaacaatgtctgtcatatgtattttacgttctttgatgtggatacatcgtctcatctgtttaagctagttattaaacactgcgatctgaataaacgaggtaactctccattacattgctatacgatgaatacacgatttaatccatctgtattaaagatattgttacaccacggcatgcgtaactttgatagcaaggatgaccactatcaatcgataacaagatctttgatatactaacggacaccattgatgactttagtaaatcatccgatctattgctgtgttatcttagatataaattcaatgggagcttaaactattacgttctgtacaaaggatccgaccctaattgcgccgacgaggatgaactcacttctcttcattactactgtaaacacatatccacgttctacgaaagcaattattacaagttaagtcacactaagatgcgagccgagaagcgattcatctacgcgataatagattatggagcaaacattaacgcggttacacacttaccttcaacagtataccaaacatagtcctcgtgtggtgtatgctcttttatctcgaggatacgtaataatcttgattgtacacccatcatggaacgattgtgcaacaggtcatattctcataatgttactcaattggcacgaacaaaaggaagaaggacaacatctactttatctattcataaaacataatcaaggatacactctcaatatactacggtatctattagataggttcgacattcagaaagacgaatactataataccgcctttcaaaattgtaacaacaatgttgcctcatacatcggatacgacatcaaccttccgactaaagacggtattcgacttggtgtttgaaaacagaaacatcatatacaaggcggatgttgtgaatgacatcatccaccacagactgaaagtatctctacctatgattaaatcgttgttctacaagatgtctctccctacgacgattactacgtaaaaaagatactagcctactgcctattaagggacgagtcattcgcggaactacatagtaaattctgtttaaacgaggactataaaagtgtatttatgaaaaatatatcattcgataagatagattccatcatcgtgacataagtcgcctcaaagagattcgaatctccgacaccgacctgtatacggtatcacagctatcttaaagccatacattcagacagtcacatttcatttcccatgtacgacgatctcatagaacagtgccatctatcgatggagcgtaaaagtaaactcgtcgacaaagcactcaataaattagagtctaccatcggtcaatctagactatcgtatttgcctccggaaattatgcgcaatatcatctaaacagtatgttgtacggaaagaaccattacaaatattatccatgatagaaagaaaatatctatatgattggagaagtaggaaacaggaacaagacaacgattactacattattaaatcatgaagtccgtattatactcgtatatattgtttctctcatgtataataataaacggaagagatatagcaccgcatgcaccatccgatggaaagtgtaaagacaacgaatacaaacgccataatttgtgtccgggaacatacgcttccagattatgcgatagcaagactaacacacgatgtacgccgtgtggttcgggtaccttcacatctcgcaataatcatttacccgcttgtctaagttgtaacggaagacgcgatcgtgtaacacgactcacaatagaatctgtgaatgctctcccggatattattgtcttctcaaaggatcatccggatgcaaggcatgtgtttcccaaacaaaatgtggaataggatacggagtatccggagacgtcatctgttctccgtgtggtctcggaacatattctcacaccgtctcttccgcagataaatgcgaacccgtacccagaaatacgtttaactatatcgatgtggaaattaacctgtatccagttaacgacacgtcgtgtactcggacgaccactaccggtctcagcgaatccatctcaacgtcggaactaactattactatgaatcataaagactgtaatcccgtatttcgtgatggatacttctccgttcttaataaggtagcgacttcaggtttctttacaggagaaaggtgtgcactctgaatttcgagattaaatgcaataacaaagattcttcctccaaacagttaacgaaagcaaagaatgatactatcatgccgcattcggagacagtaactctagtgggcgacatctatatactatatagtaataccaatactcaagactacgaaactgatacaatctcttatcatgtgggtaatgttctcgatgtcgatagccatatgcccggtagttgcgatatacataaactgatcactaattccaaacccacccactttttatagtaagtttttcacccataaataataaatacaataattaatttctcgtaaaagtagaaaatatattctaatttattgcacggtaaggaagtagaatcataaagaacagtactcaatcaatagcaattatgaaacaatatatcgtcctggcatgcatgtgcctggcggcagctgctatgcctgccagtcttcagcaatcatcctcatcctcctcctcgtgtacggaagaagaaaacaaacatcatatgggaatcgatgttattatcaaagtcacaaagcaagaccaaacaccgaccaatgataagatttgccaatccgtaacggaaattacagagtccgagtcagatccagatcccgaggtggaatcagaagatgattccacatcagtcgaggatgtagatcctcctaccacttattactccatcatcggtggaggtctgagaatgaactttggattcaccaaatgtcctcagattaaatccatctcagaatccgctgatggaaacacagtgaatgctagattgtccagcgtgtccccaggacaaggtaaggactctcccgcgatcactcatgaagaagctcttgctatgatcaaagactgtgaagtgtctatcgacatcagatgtagcgaagaagagaaagacagcgacatcaagacccatccagtactcgggtctaacatctctcataagaaagtgagttacgaagatatcatcggttcaacgatcgtcgatacaaaatgcgtcaagaatctagagtttagcgttcgtatcggagacatgtgcaaggaatcatctgaacttgaggtcaaggatggattcaagtatgtcgacggatcggcatctgaaggtgcaaccgatgatacttcactcatcgattcaacaaaactcaaagcgtgtgtctgaatcgataactctattcatctgaaattggatgagtagggttaatcgaacgattcaggcacaccacgaattaaaaaagtgtaccggacactatattccggtttgcaaaacaaaaatgttcttaactacattcacaaaaagttacctctcgcgacttcttctttttctgtctcaatagtgtgatacgattatgacactattcctattcctattcctatttcctttcagagtatcacaaaaatattaaacctctttctgatggtctcataaaaaaagttttacaaaaatatttttattctctttctctctttgatggtctcataaaaaaagttttacaaaaatatttttattctctttctctctttgatggtctcataaaaaaagttttacaaaaatatttttattctctttctctctttgatggtctcataaaaaaagttttacaaaaatatttttattctctttctctctttgatggtctcataaaaaaagttttacaaaaatatttttattctctttctctctttgatggtctcataaaaaaagttttacaaaaatatttttattctctttctctctttgatggtctcataaaaaaagttttacaaaaatatttttattctctttctctctttgatggtctcataaaaaaagttttacaaaaatatttttattctctttctctctttgatggtctcataaaaaaagttttacaaaaatatttttattctctttctctctttgatggtctcataaaaaaagttttacaaaaatatttttattctctttctctctttgatggtctcataaaaaaagttttacaaaaatatttttattctctttctctctttgatggtctcataaaaaaagttttacaaaaatatttttattctctttctctctttgatggtctcataaaaaaagttttacaaaaatatttttattctctttctctctttgatggtctcataaaaaaagttttacaaaaatatttttattctctttctctctttgatggtctcataaaaaaagttttacaaaaatatttttattctctttctctctttgatggtctcataaaaaaagttttacaaaaatatttttattctctttctctctttgatggtctcataaaaaaagttttacaaaaatatttttattctctttctctctttgatggtctcataaaaaaagttttacaaaaatatttttattctctttctctctttgatggtctcataaaaaagttttacaaaaatatttttattctctttctctctttgat

SEQ ID NO: 27 - protein, 617 aa, Homo sapiens [sequence omitted]

SEQ ID NO: 28 - protein, 643 aa, Homo sapiens
  MISC_FEATURE: human sodium iodide symporter (hNIS)
MEAVETGERPTFGAWDYGVFALMLLVSTGIGLWVGLARGGQRSAEDFFTGGRRLAALPVGLSLSASFMSAVQVLGVPSEAYRYGLKFLWMCLGQLLNSVLTALLFMPVFYRLGLTSTYEYLEMRFSRAVRLCGTLQYIVATMLYTGIVIYAPALILNQVTGLDIWASLLSTGIICTFYTAVGGMKAVVWTDVFQVVVMLSGFWVVLARGVMLVGGPRQVLTLAQNHSRINLMDFNPDPRSRYTFWTFVVGGTLVWLSMYGVNQAQVQRYVACRTEKQAKLALLINQVGLFLIVSSAACCGIVMFVFYTDCDPLLLGRISAPDQYMPLLVLDIFEDLPGVPGLFLACAYSGTLSTASTSINAMAAVTVEDLIKPRLRSLAPRKLVIISKGLSLIYGSACLTVAALSSLLGGGVLQGSFTVMGVISGPLLGAFILGMFLPACNTPGVLAGLGAGLALSLWVALGATLYPPSEQTMRVLPSSAARCVALSVNASGLLDPALLPANDSSRAPSSGMDASRPALADSFYAISYLYYGALGTLTTVLCGALISCLTGPTKRSTLAPGLLWWDLARQTASVAPKEEVAILDDNLVKGPEELPTGNKKPPGFLPTNEDRLFFLGQKELEGAGSWTPCVGHDGGRDQQETNL

SEQ ID NO: 29 - protein, 4 aa, Artificial Sequence
  caspase target sequence DEVD
DEVD

SEQ ID NO: 30 - protein, 4 aa, Artificial Sequence
  caspase target sequence LEVD
LEVD
